United States Patent Application Publication US 2022/0008368 A1 - sequence listing, part 2

SEQ ID NO: 2 - DNA, 58617616 bp, Homo sapiens (residues 2,171,024-4,342,046 of 58,617,616)
  modified_base (1)..(60000): a, c, t, g, unknown or other
  modified_base (24448981)..(24498980): a, c, t, g, unknown or other
  modified_base (24552653)..(24552752): a, c, t, g, unknown or other
  modified_base (24891257)..(24891356): a, c, t, g, unknown or other
  modified_base (24895791)..(24895890): a, c, t, g, unknown or other
  modified_base (24898314)..(24904771): a, c, t, g, unknown or other
  modified_base (24908590)..(24908689): a, c, t, g, unknown or other
  modified_base (27190875)..(27240874): a, c, t, g, unknown or other
  modified_base (58607617)..(58617616): a, c, t, g, unknown or other
tcgatatctgctgactgcattctccgcctcccaggctgaaaggattctcttccttcagcctcctgagtagctgggattacaggcatgagccaccacgcctggctaaattttgtattttttggtggggccttgctgtgttgccccaggctagtggtaactttgataagctttgggcctcagcctcaggctgtgtggtggggtctaaggtacagcaggggccccagaggagtcctccaggggaaggactgcgagaatgctgtggcactggcagagccttttacctggaggatccctgcattgagcccttctggtcccgaattgtactgagccctcttcttcctgcctgtaggctgaaagaatgaattcctggccctggaaggttcaaacagcagttctcaggggtggaggtggctctgcccccaggggacacctggtggcgtctagagacctttgcggttgtcaccaccggggtgggggaagcccaaggatgctgctcatcactcacagagcttggggcagccccaccaccgagggcgggccaggagacgccaagagctgtgcctttcatcgcctggggtcccgggcaccgaccgccgccgggtgtcgctccgtgttcgtgtacatgccttctcctgggggtagccctgcttttatttcctgagtgcttcctgggaccatgcatgtccggcaggccctggccaagatccaggcttgctgcgtgcagtccccgcccactgtgtccccctgagggaaggacctgaggtgaagttagcgtaatgggagtgtatttgggcctcgtttgcgggctgcagctctggagacacagattcaagtgcccagaatgtatgcgcggcagttacaagtggggcttcctggagaaaagaaggggcggcttttgcattggaatcacagaagtgattgcccggctccacgtccttcctggtatctcagactccagggacgtgaagataacagatggtcacattgtgcaaatagtgataaccttgtaggtaattcatcagctagtgtggaaaccccaggggaggaaagaaggccctgggagggagtgactgaaactcacttggaggctctctgggcctgtggagttctgcacagcatgcagctcccactcctcggacgcacttttcttttttgttttcttttctttccttttttttttttttgagacggagtctcgctctgtggcccaggctggagtgcagtggcgcgatctctgctcactgcaagctccgccttcagggttcaagtgattcccctgcctcagcctcccgagtagctgggactacaggcgcccgccgccacgcccagctaattttttgtatttttagcagagatggggtttcaccatgttagccaggatggtctcgatctcctgacctcatgatccacccgccttgggctcccaaagtgctgggatcacaggtgtgagccaccgtgcccggccagccacttttctttctttctttttttttttttgaagacagagtctcactctttttactcaggctggagtgcagtggcgccatctcggcttactgaaacctccgcctcctgggttcaagccattctcctgcctcagcctcccgagtagctgggattacagatgtgtgccaccaggcccagctagtttttgtatttttagtggagacggggtttcaccatgttaatcaggctggtctcaaactcctgacctcgtggtctgcctgccctgcctcccaaagtgctgggattacaggcgtgagccactgcgcctggcaatatttttcctcttttttttgaaataacatccttgttgtgacagttcacgtatcataaagttcacctgttttaggctggacgtgagaatggcatgaacccaggaggcggagcttgcagtgagctgagatcgtgccactgcactccagcctgggcaactgcgcgagactccatctcaaaaaaaaaaaaaaagttcacccgttttaagtgtacatttcagtgtgttttagtatattcacagattgtgcagtcgtcaccattgtctaattccagaacgttctaatcaccccaaaaggaaacgctgccgcctcagcagtcagtgctggtctcccctagcgtcctggagcgtttttccctgcatggaggcccacgagtcccgcgctttcctccttccctgtcacgctgtggctttaggaggcccacgagtcccgcgctttcctccttccctgtcacgctgtggctttggcctcaggctagagggtcggtgtctgtcagcctgtgctcagacgagggcgaggagagttctggtcagcgcgtccagcctccctcctgtgttgctttgctgctggaaaaagagggtcctgatgcagaccccaagagaggagagaactcgaggtgagccgcggatcacagtgagagcagccaccaagccgcttccttacacagcgggcctccctgacagagcagggcgtcctcggggagcaggcagagggtgcctgctcttccttagcgcctccgtctgtgagaaacggccagggttgcgagtaaacctggaacgtgcagacactcactggaggccagccgggtggtgccatccgaccacccttcaagcccagcctgctcaccggccctctcagtacagcgggcacgggttctgcgggctgcccggaagacctcccccagacccatagatgctctgtgtccttggtgggcagctcataagtgtgaaccttcccggtaccttgcgagtgcctcactacgcacttcaagacggggtcgctccggttgtgttttatgaaaccagaggcctggtgagctgagcttcctctcacagcttcacagcagcctgtgtgggtggcctcagccctcctgagcccctccagtgtcgagttgctttgactgtttccagggaactcctttggttgttgcgtagcttgggctgtttgtttgtttgtttgagacaaactctgtcacccgggctggagtattggagtttagtggcgtgatcataacagtgcaaccttgaactcctggctcaagcgatccttccacctcagcctcctaaagtgctagcactacaggcgtgcacagctgtgcccagccagctggggctgttgcacatgggctagttattatcaagtcagctgaagccttgtcagccatccttggtctgagctctccctggctctcgggcagcaccgtcttcctcctgtggaggtctgagtccccttttcacactgcccttgatcctacagacagatgctcagccaggaagcaacatgctctgatgtccaggcccagctctgctgtgaagtagctgcatggacttgggccagggcctgtgtggaccttgggttgagggtcaagtctaaaaatgctctgtcaggttgggcacagtggctcacatctgtaatcccaggacttggggaggccgaggcgggcagatcacctgaggttgggagtttgaaaccagcctgaccaacgtggagaaaccccgtctctgttaaaaatacaaaattagctgggtgtggtggcgcacgcctgtaatcccagctacttgggaggctgaggcaggagaatcgcaaaagctaagataaattttgtttttttctttttttagagatggggtcttgctgttcacccaggctggagtgcagtggtgtgatcacagctcactgcagccttgaactcctgggctcaagtgatcctcccacttcagtctcccaaacagctgagactacaggtgtacctgtcatgcccagctagttaaaaaaaaaaaaaagcaaaaactttttttgaagagatgagggtctcaatatgttgtccaggctgatctcaaactcctagcttcaagcagtcctcccgcctcaacctcccagagtgctgggattacaggcataagccattatgtctgatctctttttaagtttttaaatatatgtgtgtgtgtgtgtgtgtgtgtgtgtgtgtgtgtgtatatatatatttttttttttttagatggagtcttgctctgttgcccaggctggagtgcagtggcgccatctcggctcactgcaagccccgcctcccgggttcatgccattctcctgcctcatcctcccaagtagctgggactacaggcgcccaccaccacgcccggttaattttttatatttttagtagagacagggtttcactgtgttagccaggatggtctcgatctcttgacctcatgatcctgcccgccttggcctcccaaagtgcttggggattacaggcgtgagccatggcgcctggccgatattttgtatctttttaagagttgaggtcttgctatgttgcccaggttagagtgcagtgacgatcatgattcactgtggcctcaaactcctgggctccagtgatcctcctgcctcagcctcctaagttgctgggaccccaggcatgggccactgcatctggccaaggagataaattttcataacttatttaaccaagtataactggaatattatcattttatcatgtaattaaaaaattgttctggctggacgcagtggctcacgcctataatcccagcactttgggaggctgaggtgggtggatcatctgaggtcaggagttcaagaccagcctggccaacgtgatgaaaccccatctctactaaaaatacaaaaaattagccaggcgtggtggctgacgcctataatcccagctactcaggaggctgagacgggaaaatcgcttgaacccaggaagtggaggttgcagtgagccgagactgcgccattgaacctgggaggtagaggttgcagtgagccgagaccacaccactgcactccagcctcggcaacgagcaaaactccgtctcaaaaaaagaaaggaactcccacacgagctggaagccagcactgggctcttccgcacagaggctcccacccatagaccaggagtacgaacccaaccgtgctgctctagacatgggccctgggatgatcacccaacctctgtgtcccggctctgcctgtcccctgggctctccaggaacaggtctgtgctggaaacgcctcttggccgaggctgcttttactagacatccactctcagttgggggtcctccaggccctgcacacccacccaccatgagagggaatgtcaccgcttggcctttgggattcagaaaaacctggtgaagtctgcacaaagccctgtcccccagccctcggtccacacagcatcccacaccacaaggcacctctggacaggaggcagtgcgagcaagaggggacaggggcagtaactcggggtgcactgcctggtggggacactgtctccctagctgtgaatgacagggaatgaggcacaaggacgaaacaggcgtggggcagagggcacggctcgcgggagttgcagagcgagttcaccctgctactgcttctgcggggcactcatttttagaagtacacttacgtggcccccaaaataatgtcacgctgccaaggagagcaggcaagggcaggtgacaccgctgtcaatcagagcatttccagccctcacacctgtgagtcatctggctcccaggaacattctctgttccagtaaggcctgcgcctgtgagaagcgcttggctgaatcctaggaagggggacttgggccgacagccccctccaacctgcgcagcctcaggacactcaaaccacagctgcaaacactgccagccagacatgcagctcccgcggccaccactttgagacagcgactccctgtgacaagaaaactctgaaaccaggcgaggcagggccctctgtcagatgatcactggggaagacgctatggacagacaggaacttctgggaccacagcaggctggaattccagcttgaggagggagaggggaaccctgccgtgggccctgacagtgagcaggaggaaaggggtctcacagaagcaggaccccgatatgagggagcaggcccagcaccccttcctcccgcccccagcccctatccagagagcaggctggccctctgggtctcgcttcagatgcgtagaacccagtgcttccggctgcaccctgcaacatcccgcagcagtctgtgggggtccgcaggaagaagactcccccgtgagggggagctctgtggagcggcactgtcctgacggcagccactagccactcggctgtgggcacccgacatgtggctggcgggaaggagctgtgcagagcacagaacatacaggaaacgaccaggtgtgctgcactcgccccacacacgcagtcaaatcacgcaggaacaattttttttttttgggagaaaaagttttgctcttgtcgcccaggctggagtgcaatgccgcgatctcggctcactgtaacctctgcctcccgggttcaagcaagtctcctctctcagcctccctagtagctggaattacaggcacccgccaccacacccagctaatttttgtattattagtactactaacaatttttatattattagtggtaataatttttgtattactagtgatagagctaatatttgtgttattagtattcgccacgttggccaggctggcctcgaattcctgacctcatgatctgcgcccagctcgtgttgaagttctttagccacctttgagcaagggaccctattttcactttgtccggggcctgcaagttctgcctgctccctcgccaaccctcgccagccctgctctccgctctgcccagccccggctcttgcctcctcctatttctttttcctttttttttttgagctggaatctcactctgctgcccagattggagtgcagtggtgcgaccttggctcactgcaagctctgcttcctgggttcaagagattctcctgcctcagccactgagtatcttggattacaggtgtgtgccaccacacctagcaattttttttttttttgagatggattctcactctgtatcccaggctggagtgcagtggtgcagtctcagctcactgcaacctctgcctcctgagttcaagtgaatctcctggctcagcctcctgagtagctgggattacaggcacgcaccaccatgcccagctaattttttttttttttgtatttttcatagagatggggtttcactgtgttagccaggctggtcttgaactcctgacctcgagtgatccacccgcctcggcctcccaaagtgctgggattacaggtgtgaaccaccatgcctggccattttttttttttttttggtatttttttgtagagatggcgtttcaccatgtctttgggaggccaaggcagacagctcacttgaggccaggagtttgagaccagcctggccaacatggtgaaaccttgtctctaccagaaaaaaaaaaaaaacaaaaaatctccaaaacacacttcactttgaaattttttttttttttttttttgagacggagtcttgctcttttgcccaggctggagtgcagtggcgcgatcttggctcactgcaagctccgcttcccgggttcacgccattctcctgcctctgcctcccgagtagctggactacaggcacccgtcactacgcctggctaactttttgtattttttagtagagatggggtttcattgtgttagccaggatggtcttgatctcctgaccttgtgatccacccgcctcagctggcctcccagagtgctgggattacaggtgtgagctaccgcgcccggccacgcccagctaattttttctatttttagtagagacggggtttcaccttgttagccaggatggtctctatctcctgacctcgtgatccacctgcctcagcttcccaaagcgctgggattccaggtgtgagccaccacgccaacccctaaagtggttttagacttagaagaaagttgcaaagcaccgcacagactttctatgtggctttatttcatcacagtaccctgatccgaaccaggaggtggacggagctgtggcctcagtggcatatacgtcccatcccatcattgccatgagcccttgtgtctcctgtctcccctatctaggctgatccctcagtgcataaggaaagctgggggggggtctcctatggtctggcctttggaggagagccagctggggtctctgtgtggcacccctcagtcaggcttggctgcttctctcagggttatactgaggttctgcatcctggcaggagccccacagatggggttgcgtcccgctgggccttgggaggctcgtggcggctgcgtgtctcactgtgatgacgctggccttgtgtttcgtcaggtggtgtccacaggtgccctgctggttgctttttctctgccctgggagaggctcgctgaggctgcacggctgcctgggagaggctcgctgaggctgcacggctgcctgggcggcctctgacgcgccctgtggactgcagcatccaggggatcgcgtctgcaactcttattgctttggcgtttacctattggggatttaaaaaaaaattgttcatttttataaaaaagacatgggctggctgggcacggtggctcaggcctgtaatcccaatactttgggaggctgaggtgggcggatcacctgaggtaaggatttcgagaccagcctgatcaacatggagaaaccctgtctctaccaaaaatacaaagttagccaggcgtggtggctcatgccagtaatcccagctactcgggaggctgaggcaggagaatcccttgaacctgggaggtggaggttgcagtgagccgagattgcaccacttcactccagcctgggcgacaaacaaacaaacaaacagaaaaaagacatgggctctcgctgtttcccaggctggcctcgaactcctggctcaagtgattcgctccctgcacccagcctgttgtgggtttatatcagcacagtagcacgcagacgcgacgaaagtgcacgtgtcctggtggcgtgcacttggtctctgattctcggtgatgggtgtggagtcggagaggcttgggtggccctgctgggtgtgaacctgcctttgacattggccttgtagagggagcgaagggcagggtgctggacggggagggatctgtgttaggccaaggaccttggttttagttgtggcaggttctgggctatggcgaggccgcccacgtgggctagcccagtggtttttttcccatggtacagttggggaaacaggccccgtggaggctctatcacctgcggtcacataccaggcctttgccaacgcaggactcccagccaggctggagctccctggctggagcagcgtcgggagaattcccggtgggcctgcggagcgcggtctgagggacttgggctgtgttgagggatcaactgacctccagggaaaaaatggggagacatgtggagcggagcttggggcggccgtttgctttagggtgggagaggagcaggaccgggggccatagactccatcccaggccgctgcctgctcgctgcctgtagtaggacacagcgtgccagaataggtccccggcaaggtctgtgttcccttcgtggtccagggtctgggagtgtctctggtggtacccgctgggtggtgggcttgggagctgcaccagttgggaaatgaagagatgggaagttgacggcatcgcttgtccgggaagagagcgatgggctcacggggtggaggatggctctgcgtctcaaacttctctctctgtttcaggataaacatcacgatgctgctcatgaaatcatcgagaccatccggtgagtgcacggcctgcagtgtgttgtcttcacagccctgagccacttccgtggacacccgtgccctgcagattctgttgtggggatggctcctgcaggggtggactcctggaggtgttgtgaagcggatcaggggtgactcagggacgggtagagctgcttctcccagctccattcctggccagtgggtgcagaagtcttgagctgctggggtgtccagtgggtcctccaggggcgttgccctgccttcctctgtctccttgtcagtctccctgctgtgggttttgggccgaccttcaccctcacgcgccctcgacggcctcctgtgtctgtgccccatgggtgcagagaggagcattctgggggtgacttggatgggcaggaggcggaggccgtcctgtcctcgtaagctccagcctgggctccaggatctgcagcaacagtgcagggaggccctctgggtgcctctctgctgcccactgggaagctgcccatggtggccggcattctgcgtgtctcaggtgctcagggtcagaaccctcattgtgtggcacctgcacggaggccacatgtgtccatgtggccctggcgtcttgctggtctgttccttagcatactgggctgtgaggacaccgcccgtgcccatgcccagcatctgcccaggcctgcagctgccataagggccatgctgagctcctcttggccgggtggctctgtgccaggcccctagctcctgaggccctgtagttcagtgttggggcccagcggcacctccctggccaggttgtttgaggattaagtgaaatcgtttgtgtaggtcggccagggtgggcctgacccagggtccgtgcttagaatgtgggatctgcttttttttaatgtcatgatccgtggaccaggcagtggagtaggggcccctctgttctttgtaaaagaagtctggtgttatggttggagggagggctctggatcaggcagctggaccccagcccagcccccgcccagcaccagccccagccccagccccagccccagccccagcccagctgcagcatgcttctggcggccagccgcctctctctgcctgggtttctcttgttgcagctgggggccaagactctgctggcgtgggcctctgtgggtgctcctcacagagggccgggcagtctttttaagaatgctcaagctgtgcacggtggctcacgcctataatcccagcgctttggaaggccaaggcagggagatcgcttgaggccaggagttcgagactggcctgggcaccttggggaaaccctgtctctactaaaaaaaaacacaaaaattagccgggtgaggtagcaggtgcctatagtcccagctactttggaggctgaggcaggagaatagcttgaacccagggggcggaggttgcagtgacccaagatggtgccactgcactgcagcctgggtgataagagtgagactccatctcaaaaataaataaataaataaataaataatgctcagctgggcatggtggctcacacctggaatcccagtgctttgagaggctgggagggttgatcacttgaatccaggagctggagattggccgggcaacataatgagaccccaagtctacaaaaaagtaaaaaattagctgggcatggtggtgcacacctgtggtcccagctacttgcggggctgaggtgggaggatcacttgagaccagtggcgctgtgattgtgccaccgccctccagccaggcaacagagtgagaccctgtctcaagaaacaaaacccaaacaagaaagagtgctccagggctgtggcttcccggggctgtgactgtgcaggttctgccagtgctgcccagacgtggtctctctgggttaggatctcggtgcagcaggggtggaagcccctctctgaccaggcgcttgctagtgtgtctggaggtgctcagcagcaggggagctgcacctgctccccatgggaaggggcctgcacagacttctggggtcagaggagaccccaggcccccggatctcaggcagtggcggtgagagtgcctctctggctgcatgctcgccttctgcagggctcggagctgactgtcttgtttgaaccttgtgtgttttctggggagcgcatctggagtctggagcttaagcgttgtagggagcagggtccaggcacaggggcgtgcaccaacacctgggcatccgcgacgtaggcagagacctcgaaactcgaacccccaccacctggagaggctgctttctcccgtgcatccccagcatgtggccagggttctcacggtgtggctgcacagaccttttctgtctcacttcctctagaaacaccgacgacgttcttacacagcaaacaccattcagtccccatacggccagtgtcccaagcacgtcctcccacagtggtgttgtttttttgagtcagcgtctggctctgctgctcaggctggggtgcagtggtgccatctcagctcactgcaacttccacctcccaggttcaagcaattctcctgcctcagcctcccgagtagcagggattacaggtgcctgcaaccacgcccagctaatttttgtatttttagtagaggcgaggttttgccaccttggccaggctggtctcaaactcctggcctcaagtgatccacccgcctcggcctcccgaagtgtggggagggctgttgtttaaagatgattgggctgtcctaggctctcctcgtttggatgtccgttgagaatcagcctttccatttctccagaaaagctagctgggctttttctagaaattggtttgagcctgcagttcagcttggggaaaggggcgtttaaacagtgtcactcccaggtattcctgcttcagtgcttttttttttttttaaggcggagtctcactctgttgcccgggctggagtgtggtggcgcatcctcggctccctgcagcctccgtctccggggttcaagtgattcttcttcctcagcctcccgagtagctgggattagaggcgcccgtcaccatgcccagcaaatttttgtgtttttagtagagacagggtttcaccatgttgatcaggctggtctcgaactcctgacctcgtgatccgcctgcctcggcctcccaaagcactgggattataggcatgagccaccacgcccggcctttggtgcttttttatgtggcattttgacaatcctttgctgctagtatgtgtaaagactgctcccttttgcctatcggccatgcccctgctgagctctggcggtgtccgcgcgtattcctcagcacgctctgtggcgcagaaccacgggactgagtgaagaccgtgcggccgctcctttcaggctccttgctgctttgagtgtttttcttgccgagttgcgctggccggaacctcctggacagtgtgatgagaagtgactgcagatggccttgcttgggttgctctcggggcctcgctcggtgcctggggcttttgatgatctgcattgtgaggtcccctgccggtgttggccaggtgtgcaggcgttgaccatgctggggacgggtgacgagaggcaccaataatcacagagggcggatgccacagcccttctgacaggatgctgtgtctttcagtgtggaagggtcttggagggcacccggacctgaggtcaggtcctggccagctggttggggagtctggggacttggcgtggggtagggggcaatgaagctactctcggagttctgggaagctgcccgctggacttagcaggtcaagaggactggggagcagaggccgaacccccatccctccctgacccctcctgcagagccgcaggccaggtggctgcggaaggtgggcctgctgctgtcacagcggctcagtgactggtcccgtgccctttccaagcggaaggcgtgtccttccatttctggcctcttggagggtaccgtcctgatggcaccgaatgccgtcctgtgggctttccgtactcgcccacacggggctgctcagatctccgtccttgttccttcggtgaattgcagtgactaattttagagtgaagcagcttttcctccccaggaggtgctgtgtgtggttgtgaggtgccgctgcggtttcctcacgtttttaagggatagtggggtgtgttggtcagggatgttggtcagctgttgcctttcttgtcctttctttccagccctttgcgtctctatggttttggtgtcaagatgacgctggctgcataaaactctgagaaagtttctgtaggtttagtgtttgtcttgtcagtgtttgatggaattcaccagtgtgtttttgtattttgtatttttagtagagacggggtttctccatgttggtcaggctggtctccaactcctgacctcgtgatctgcccacctcggcctcccagagtgctgggattacaggtgtgagccaccgcacccggcaccagttggctttagtttctagtcagtcagttgcttttcgagctctgatgtggccagtgggtccctagaccagccctgtagcagataagttcacttaggtccccagagccactggtgtgtggcctcgaagccacgtaatacctgtgtgattcagtaacagcttcgtggtaaacatcgtagccttcgttttgaagtcacgcctcccttctctctccactttgagtggaggggtaaggatgtttgttttctgttggagaggatgcagtgtttaagaacatgcggggtaatactcaagattgtttacacctgtcatcccagcactgtgggaggctgaagtgggcggatcacttcaggtcaggagtttgagaccagccttgccaaaatggcctaacccggtctctactaaaaatacaaaaattagccaggcgtggtggtgggcacctgtagtcccagctacttgggaggctgaggcaggagaatcgcttgaacccaggaggcggagcttgcagtgagccaagatcacgacactgcactccagcctgggcaacagagtgagactccgtctcaaaacaaaaacaaaaacaaaaacaaaacacaaaacaaaacaaaaaaaaccaaacccttcctgatcgtttctgctgctgtgtttcagatgggtctgtgaagaaatcccggatctcaagctcgctatggagaattacgttttaattgactatgacaccaaaaggtaagcagagtcctgtccagccgctccgctccgaggacagactcggctcttggggaggacaggaggacgcatcctataattagctcttcttagatggtgcaagctgatctgaaatttccttttagagttggccgtggccaccataaagttattttggtaggaaatgtttatcaactcttggcaaaggctgtcagaggccggacagaattggaaactccggttgtggaaagtgggattggcatgtgtggagtcagcccgcgctagtgatcgctctttttatagcgggcggctgacggccagaagtccgcgttcctgcctgaggctgctgggagggcctgggcggccttaggctgcttggcagctctgtttagatctcagctgggtttggttagtccctctgtctccagccctgtggctgcgttagcaatttcgccctggcagctcctgggtctcggaggagggtcttgtgggtggagaggggcagggctgtctctggaatgcttgcttggaagtgttttgtttttctttgacaaggaagacattccaggctcatgcctttttcagctcttgagtctgaaatcaacagagtagtcctccatcaagggctgtgctgtcgtgagcttaggtgagcccctctccacagagagtcaagcccagagggccacgcggctgcactttacctggctctccggcctcactggcatgtgggagggactcttgtctggggtcagcggtctcagcctcagtaaacctcgagatcctgtgcccctccctcgagccctgcccattccctggtcagcaccctggtgccccacaggcagacaagcgtgttgctggcagggtcctgcgtgccgacctgctgctgtggatttcacgccacctgcctcgcatgtcggggcctctcgccaccccccctcattgggcgtgatggtgtgctgggcccttccctggtttagtatgaagagtgtgatgcagcgtgcagatcaacagccgcatggcagggtccacagggaggggcctgcagggccctgcacagagctctgtgtccgtggagttggggagcactaaccccaaagctctgcaccctgtgctttcgggttttcacggaggcttctcggagacttgcttgatgattgcctccatctccagtcccctctttctaagcttcttaccgcagcttgggctttacctcacccaggagccccccacaagtcgcttccttacaacagaagacactcctgtcacctagaagttcccagggatcaggagctttgttaggaactagagtcccctcggatgagtgggtgttgtcgggctgagccctttcacattaacctggggcagttatggcacctcacttgtgtgtggccagcttctgccttggctctgagcagcgagcgtgtcagacgctgtgctcacggcgcccctccacgtgggtgtgtggcgtccttcctcttcgcgtgggatgggcttagccaaggctggaaggacatcagggacaggctgggcagggggtcttcgttggagctggcagggccacctgagggaccgagccattagggcttcagaccaaggacagccccagctcctctgagcacctgcatttgcacagcctgccagggaagagtctcttcccaggagcgtgcagaggtgattttgggaaggtctggttgtcagggttgaaggcggcgtgtagaagtggaaacacaggggctgggcaccgtggctcacacctgtaatcccagcactttgggaggccgaggcggatggatcacgaggtcaggagatcgagaccatcctcgctagcacagtgaaaccccgtctctactaaaaatacaaaaaattagccgggcgtggtggcgggtgcctgtagtcccagttagtcaggaggctgaggcaggagaatggtgtgaacccgggaggcggagcttgcagtgagctgagatcgcgccaccgcactccagcctgggtgacagagcgagactccatctcagaaaaaaaaaaaaaaagggaagtgaaaagacaggaagggccagggctgctcctctggagctgcggggaaggcgggaggcagcaggccggctctgtgggttcctccggcccgcatggtgcctgctggccctctgcaccacctgggctccttccacccccgtgtccttcgtcctccggaggatccaggtcctgtgtggccgtgctcccggggctgtcggcaggctcttgttcttggtgtttgctcctcttaagttctcttgctttatcctatgcagctgctggttaaggaaaacatgaacttggcctgtggagcactggttttcctatgaggaaggggaagtgtgaacctcggcacatgcagtgcccaggtgaattcagggtggccagggcagggcaggaagagcatggggctggggctggggtgggagcaggggtgtgattgtttagccacgtctcggagcatctgccaggctcttggggttgccattgggaggaaactgcttgcgtgcacgtggaggtggcggaggacggaggcggaggaaagagtccccagccgccgccccccccccccccacccgcacaggtgcaggccccctcggcgctggggatgtggaagtcggattgttctctgggaggggccgtcctgggcactgcagggtgccgagcagggtccctgcctccatctcttgcttgcctcgccacattcctggggtccccggtgagagccactgtgtgtgacagtgttcactggacaggtacgcctcctcctcctgtctcttgctctgctctggacaccttctgaggtggagggacagacgctgttgtccacattttgccagtgggtccaacagacttggaagatgagcaagttatcccaggtggagactggacagactaggccaggcagaccccgtagcaggcttgcccccaccccggaagcccctctgagcccaggcctggctgggccgcgtggccggtgtttcttgtggctcacgtgccccacagacagtgggcactccctggagcacaggtgccccctgccctctggtgggctctgccccgatgctgttgggttgtgggcacttaggtaatgagggtttgccttgcggccagggcaaggagggcagagttgctgcggggggactgagtctcactgtggaccctgctgtgccgtgtctgacatgacacactgctgacgtgacacactgctgacgtgacacactgctgacatgacacactgctgacgtgtgaatgagttggagctttggaaggacacgctcacagagcagtgtgggtgggggtgaggcatcttcctttctgcagtgctcactcctcctgcacctgcccgggcagaggcctggtggtccctgggagaccccagccgttcacctgcctctggcgatggtggctgtccccagccagggcaaggaagaccctctaaggccggccccagggtttcccacttggggggctggcctcagtccccctcgagccctctttctctcctcacgcctccagcacacgtggacctcggctttgcgcgggagcctgggcaggtccagactgcctcagggctcagtgcttccctgcaccggactctcggccggccacctcgcttgtgtgtcaaacctgaaatctcctgcatcagggcggaaagcgaggcttctgccagaagggtcttggccagctggctggtggctgtccaggcagggaccacaccttggagcctgccttatccacatgctgtcccctcccatgcatgcggctggctcctgcccgcatgaccagggccttcccttgcctttttcagcttcgagagcatgcagaggctctgcgacaagtacaaccgtgccatcgacagcatccaccagctggtaggtggcttgcccctgcccagagggggttagtagtgccaggctcccggacccctccagaccccttatgtcaccgcctcggggcacagagctccccttagagcccctggggattggaatgtgcagcgtggggggacgatgggctgtgggtgagtggtgtgggggctgccgaggctgggctgtgtgctgtggccgtgtgccaaagcagagccgtccgtggtttgtgtgctgaggcagggccctgagggttgtggtgtctgcacacgcctctgcagccctgggttggtgtccgcaggtcccagcagaggcggggtccctgtcctccccgggctgtgtgaatgccggccttcccccttggacctcccccacaccgcctgccttcatcaggctggatgccggcctgggctgcacccttgggcaccccggtcctgctgtgtctcgtgaggctttcctcacagaggacggggcacacagtgagctggggtgtagcagggaggggaacgtgctgcttcccatgttctagaaagcaccgggggcccctggtgcatgggggtaggggagctctttcttgaaggtcttgctgtggagggagccctggtgggggtggcatgggctcacttggccctcctgagtgggactgggctgggctgggctgccccatcagcctgccacccggctctggcttcccctcaacctcatgcatgcagctctgtgggcccctgagagctgagctggcctgggcgagaggggaccacctcagcctgctgcagctggtggggaggaaggcggggtcccacgtagtcgagtcagatgaggtgtggtaggctcagggctttcacggggctcgtggcacctgacgggggtcccttggtgtcagcgccccaccctgctgccttggcccagaggaggggtggtggtcttggtggcctgtgtggttttggtggtcttgccagtggggagagaggcccgtggcaggaggtggagcctcctaggacccctctgagttggggcctgtccctggggatgctgctttactgcttgtaggaaatggggctgggttggaaactgacctgggagcccggcagccaccctgcagggggacgagaggccatgcagccgactccctgcttccgctgggaaaggtcccgggtcttggtggtggaggggctgggccgtgaggtttatgtgacatggccgggccaccctccgtccgcagtggaagggcaccacgcagcccatgaagctgaacacgcggccgtccactggactcctgcgccatatcctgcagcaggtctacaaccactcggtgaccgaccccgagaagctcaacaactacgagcccttctcccccgaggtgtacggggagacctccttcgacctggtggcccagatgattgatgagatcaagatgaccgacgacgacctgtttgtggacttggggagcggtgagtgtcgcccgccatgcccggctcctgtgcacttccaggccacacgctctgtgcctgccccatgcctgcttggagaagagtttatcagggacttgcgacgttggcgtggacagtgcttccttctcccagcgcctctgtcccgctgtggggccgttcctttccccagccctgaccgggctccacccagaggggagaaatcgcaggaacccagtggctcccagaccaggcccatcctcccaggtgcccggagactctgctttcgtcctgcttcccaccagctggggagctagacctgtgcaccctctactgctcgctcccagaagctgccactcgctagcctgggccccagcccgggccccacccacggctgcagcctgccgcagtccttccctgggcacacctgctccctccacagcggctggaaaggtcccccgcggaggaagaccccaggtccctgggctcccggaggccctcgcgccctccctgcatccccagtctccctcggcacccctgcgtctgggccgtgccctgcccctcccaggttggggctcccacctgctggcattctttcagcctctgcctgcactcagactctgcttgtgaggtgtcgtctcctctcaaccacgggcggggctccttgaaacgaggccctaggtgtgtcttcagcagcagcgtggcctggctgaagcacagatgagcggcccgtacacgaacagcctcagtagcctgacgaattcttgataggaccaccccatccaggctgcagggctgacggggccacccaagggtcagacagtgaaggccccttctccacagtgtctaggctgtccctgggctccttggacctcgatggacatgtgaaccttgtgcctgcaggcacgcgagccccacgtctgccccctttccacagtcctggctttgacgtggggaaggggccccaggggcagggaccaagaggactttgcacagactgggtgtggcagctcacgcctgtcatcttagcacttggaaggctgagatgggagggtcacttgaggctaggagttcaagaccaggctggtcagcatagcaagatcccacttctgtttatttatttaaatttattttcaaatttaaaaaatgcaataaaaagaatgtgtatcgtctggacgtggtggctcacgcctgtaatcccagcactttgggaggccaaagcaggcggatctgagctcctgaggtcaggagttcgagaccagcctggccaacatggtgaaactttccctctactaaaagtacaaaaatcagttgggtgtggtggcgcgcgcctgtaatcccagctacttgggaggctgaggcaggggaattgcttgaactttgaaggcggaggttgtggtgagacgagatcgcatcacggcactccggcctgggtgacagagtgagactccgtctcaaaaaaaaaaaaaaaaaaaatggggcatatctggctgggctctttggctcctgcctgtaatcccaatgctttggaaggctgaggtgggaggatcgcttgagcccaagaggttgaggctgcagtgagccaggatcacaccactgcagtccagcctgggtgacagaatcagaccctgtctcaaaaacaaaaaattaaaaaggcttatatgttttagatgatgacggcctagcacttgctggccgggccctggccccccgtccctgtgtgcttctcttcccactggtgtggtggcggcggtctgtgcccattgtggtcgctccatggttcatgcccgttccctggagcacagagctgcctagcaggggaggagaggtggcttgacacccccggtgtgcgccgctgcctccaccctcctgacgctggcgtatctgcagcccctgttccctccttctcccttagagccgggtgttgctgggttgtgtgctgatgctgtgaaaccgcagcggccgggagactgtcctggctgcgggggacccctcactgcctctcccaccctacattgagcctcagtcagatcctgctcatgagccttcctggggtgccataagattttatcagccaggttgctgtgtgtctgtgtgctggtgacgtggggataatttgaggtggacggcagcctttccagacctgcaaagtcttgggcagccctgtctgtctgaacagtgaacatcacatagggccctgagactcaaaatggattctggtttcgggggccaccaagtgatgtccatggatgacgcgttgtgatgaccgtcccctcgtgggggctctgtcaggggcctggtctctgggaaggatcctgagtgaccttggagcatcggatatgtgtggagactgtggcctcccctgtgggtcttcatggccgcattcttgtggcctctgtctccgagcctagcacggcctcccgggtggcatctgagcgctgtgtggtatctgatggatctctctgatcataggtgtgggccaggtcgtgctccaggttgctgctgccaccaactgcaaacatcactatggcgtcgagaaagcagacatcccggccaagtatgcggaggtgagcggatctgagggccagggtgtgttggaggcaggggaccatcagagaaagtgacgccctgggtgcctgcaccccactgctgtgggacttccgagtctgggtggcgttctttccaggcccaagacgtcttggttgcctgcagcgtgtgcctgtgaatagggtgcccgatcgccctcacggcccattacaggccggccctccaggcctgtccaagcgctgcaggggtgtctcggagcctgtttcatggcacgtgccactagtgaggcgagaggtgctcagctctacctcgtggcacagccctccgagaagcggggtgttttgggtggcctgcccaggcaggcgcattgaggccctgttgctctgagagtttgttgttgtttttttttgttttgttttgtttttgagacagagtctcgctcagtcgcccaggctggagtgcagtgactcgatctcggctcactgcaagctccgccacctgggttcacaccattctcctgcctcagcctcccgagtagctgggactacaggcgccccccaacacacccagctaatttttttgtatttttagtagagacggggtttcaccgtgttagccaggatggtcgcaatctcctgacctcatgatccgccctcctcagcctcccaaagtgccgggattacaggcgtgagccaccgcgcctggcttgccctgagagtttgtaacgggcgtttggtttctttccttccagaccatggaccgcgagttcaggaagtggatgaaatggtatggaaaaaagcatgcagaatacacagtgagtgccatcgctccgccccggctcccatcgccggccccacccccgctcccaccctcctgtcagcccctcctttcttgccgatgttggcacatggctgttggcacatggtgtgccccctggagtcccctctggttctcgtagggctgcctgggcgtggcgtctgagccggcagcaggcgcctctgttggtaccgtccctctcgtcctctctgacatggcttctgtccctcggcagcatgcggtgcacagaggtggtgcagggaatgggcttggggctccatggagcggaggcctgtgggacaggctgggttctgggctggctgcggcatccttggggtgtcatccctcactggggacagccttgtttggacgggttcctggtcctcagtgctgtgttcttcatgacaagccagcaacctcggggtgggcagtgttctctcccgccctgttgtgatgcagtctcaggtgctcctcccatggaccctggggatggcgtcgcgtgtggccctccctgtagggtgtgcgctcccctttcagtggctgagtggcagtgggatgggtgtgggggtgggaaggggatgctgtttagggagcaggaaggacagttttcctgacccaggttgggtgattaatgggccatagcttccaggagtagccaccactcctgcatcctcctgggaactccttcccaccccacgctgagtccttagacaccaggctccgccctggtcctttccacacagaggcctgcagagctgggtccttccttgacctgtgtgctcctcctcacagtcccagctgctcaggcgctcacctgtggtggaggctgatggcgccccgggcccatctgctctgtctcccagcgacgtcccagacctccccgcccttatggggtgtgggcttggtgctggtgcagctgctcccgtgatgtggattggagggtggcttggggtctggggactgcaggaaggtggatgcttcctattctagacctggagcccctggagtacagagcccgcagcccctcgagcctcagagcccgcagccccttgagtcctgagaagcttcccttataaggcagaaggagtgctgggtggggcgggcaccaggtcaccaccctgggaggacgatggcacaggggttgccaagctgcccagcagagcggctcaggatggaacatggcaaggccaactcgtgatcccaggtgcctgcgacgacccagttcctgggtggaatccgcaagtttgcagaagcaacagaaacaaagtgttcaggggtcctgttgtcattcgactctcacagttcagagggatgcatgagggacacaggtggcatacagttccagtcccctcccaggtggtgcccacccctcactgtctcctcagcagggtgcgtggaggcgtggctggggctgtgtgcccgcccgtctgcctggagctccctgctgaggtgccctctgtgggcctgtcagccagggccttcctcggatcgccgtgaggcctcgacattcctgtcattgccacgagtgggcgtgcgtcctgcctagcacgcgcccctgtccccagctcagacccctccgcactgtcccacagcacaagtgaaggccggtgtcagggtgcagggccccgatccctggtggccccgaccggggtcaggagcccttgccaactggctctgccttgggcgtcctggctgtggtggtctggcagatgaaccttttggaggatcacttgagcccaggagttcggacacattttttttgtgcatgtgtgaaagaaagtcttgttctgtcgcccaggctggagggcagtggcgcaatcttggctcactgtagcctccgccccctgggttcaagtgattctcctgcctttgcctcctgagtagctggaattaaaggcgcatgccaccacgcccggctaatttttgtatttttagtagggatggagtttcaccatgttggtcaggcgggtctcaaattcctgacctcgtgatccgcctgcctctgcctcccaaagtgctgggatgacaggtgtgagccaccgcgccgggcctccttggggtttcctacgttgacagttgtgtcgcctgcaaacacggagctttgccttttccttagcagtccgtgtgcctttcctctccctttcccgtaccctcgtgctggccggcgctggcatttcccatgccatgtgagtcgtgagggcaagacgggtacccttccctgccctggtcttggcggtcagctgagcccctggccgcggagcacggtgttagcggcgggctcgtgtggatgctctccctcgggtggaggataagcccgtggtcctgagtgtgcagcgtgcgctttttcgttgctgcttctagtgtcagcgcggtgctgtggtttctgttcctcaccccgttgctgtgatgggtttccagtgctgaacgcgtccgccttggtcggcgtgcgattctgtttatccaaggtgggattctgctggctgatgggccgctgaggggttttctgccgtggtgggagccgtggcctgcggtgcttccttgcggccacgcctgtctggtttggtctctgggtggcgctccctcggcttctgttctgctgtctttgaccaggacttgcgcatccagggctgtgggcccggctctccttccctttctcatggtgattgttcccaaatgctgtgcccacagtggaagctgtgtggtgtcctgggttctgggtccacttgcactctggccggaagttcccacatgggttcctggctgtggcaggcgagccacacagatcccagcacagaggatggaagccctcgccatggttcccagcgatggccaggagggcgccatggtgccttcctccgcgcggtctggctgggctgagccttgctcaggagaggggtgctgtcgggtggtggggctgccgcagcactgctcccccttctgcctcatcttgtcagcgtctgggtcagcaccctgcctcctggggcctgggtccatgacacggctgagcagcatggtgtctagtgtggcacaggtgctcctggcatggagctgcgttcgtggtctggattccgtgcaggtttaggtgctcacggtcaggccagtggctcctgagatgtgtctgggagcatgatttgggggaaagcgtggcattcttcgtggctttggcaacacgtgtcagaaagaacctggtggtggggaaagcaggtgtcagtaccagcctctgcctctggcatccgtcctgtttacagccaaccctgctgcggagggtgggtcagagaggcttccacctgactgttccctgccctttctgatggaaacttgcatctgatattggaggaaaccctcggagcaactctctgtggctttgcctgtgctccacttgggaggctccaagtcctcccgcctgagcagtgtcaccagggaggctcctagagacccagacccccgcttcctatggggccggcatttcagactccagagggaagcagggttgcatataaaccacggtgtttgcaggaacagcttcggccccagagcccatcctgtcatggagcgtgggggaccccagggagggttcccagccccaggcctgtgatgcgagcccggatctgcttagtgctgctcaggacttgggatttgagtcatttcctgggtggcttgttcacggggaatgagggatgttcagagggtctgtcaggtgtggagagggaggagacgggtgtggggggtggcccagcacctgcagaggctcaggatggctcgcctgcgcacctcccatcccgtctcctcccctcctgggggcttcccgcggccttggagagcggaggatgtgcagctgctcctggccggggcgggtggccctgccctctggatctgcgtctgggtggacgagtggccctgtcctccgggcccgggggggtgtccctgtctctctggggctgagtgggtgggccaccctgttgcttggggcggcggcttgcttgcgttaccctctctgctcggggactccgtccccatcctgagagacgctgggtggggcgcgaggcctgtggctgttgtgtggaaaggagtgtcgctggtcctccctcggctcttggggtgctggtgtgggcttctgctgtggcccaggtgccctcacccccaactactccagcccccagcatgaatccccttcctgtctctggatgggcctgtcccggacatttcacagaaacaggatcacacactgcgtggccctctgtgtccggcgtctctcactgagcgtggcgtcctcaaggtgcatccgcgatgtggcctgggttggagcctggctcctgttctcattggggtcctgcttccaggtgtgcgcggcctcgctgtgctgtgttgatctttcatctgctgatggacgcttggctgcttccaccttttggctgtgatgagttgtgttggcttttggaggcatttgtgtccgggcttttgtgtggacatgtttttatttctcctgggaatggaggtggtagtgtttttgaaggatttgaaaggcggtgtcttgattgtccagatgctaccgtgttggacagctaggttaataagaggtgttttctcctggacggtgccaggtcttgaggtctggaggtggactggcgtcgggctgcagctggccttgctgtgagtgtggcgtggagctgtggggacagcgctgctgttagcaggccgtcagcggtgctcagggcagacgcccccagggactggcggctcagcttccctgtgtgcgtgtttcttgtggttggtgagggagggacagagctcggcgctaggctttctcagcctggccgagtgtcgctgcctgccgcagagggtgccccccagcgccctgtggcctccctcaggccctgcctggagcccagcatggtggggactgcaggccctgcctcggggcgcccctgctggccgcctctggtcctgagagtggctgcagcccctgattttgagcttacatttctaggagactgcagcgtggcttgcaggtgtgtgttggtgtggccgcagtccccttggctgggcctggcctccccaagcggatgctggagcacgaggacctgtcccggcttctcaggaggtcctgcccgttctctgcgcatccctctcacggacccttctgcctgcagctcccagggctgcagccggtggggcctgggcctcctcctgctccttcactgcaagcggagctgtgttcattccattctttcttcacaggggctgggcgggctgggagtgccagggaggccgggggtccgcgctcacacctgttttccctttcagttggagagaggcgatttcctctcagaagagtggagggagcgaatcgccaacacgaggtatggccagcgtggggcatgcagggcatgtggggtgtgcgctcacaggcgggcggtggccatggcaccggggaccgggagcggcccctcgctcctgtgctggctgtggcaggaaagaggccggtggggacaggaagggcgcctttccctcacgctgggtctccctctgcgggcgcgcagagcagacgtgcccagcagagcccctgtcggccctgcagaccctgctggcagtgagcccgttcctgctgcctgtccccttgactttgggacactgtgggcccctctcgcctggtttcctgggcctcctccccgctcaggcttggtctgggggtcttcctgtctccatccatcccttctggagtggctggcacccacacagcactatgagggctgctcgagggagcggcccctcgtggtcccaaaagccatctctgcactgcctgggcttgcccctccgcgccacctcgcacccaggcctgggagctcagggcactgtccaggtccgtccccaccgccacctgtttgtcctggtggccacgggctctgtatggttgggctgggcccccgtgctttccactgcccagcctgggtgtggccacagcactccagcgtgtgccagggaccctggaggcccaaggcgcttgtgagggcagccggggaggtggggtcagcagccggctgggccctgctcccccagtcccgccatcctccctgctcccctcatcctcccagcactctttgtcctctctgcgcccctcgtcctccccacattcctcgtcctccccgcattcctcatcttccctgtattcctcgtcctccccgcattcttcatcctcccctcattcctcgtcctccccgcattcctcgtcctccccacgcctctcgtcctccccgcattcctcgtcctcccctcattcctcatcttccctgtattcctcttcctccccgcattcttcatcctcccctcattcctcgtcctccccgtattcctcatcctccccgcattcctcgtcctccccgcattcctcgtcctcccctcattcctcgtcgtcccctcattcctcgtcctccccgcattcctcgtcctccccgcattcctcgtcctccccgcattcctcgtcctccctgcattcctcgtcgtcccctcattcctcgtcctccccgcattcctcgtcctccccgcattcctcgtcctccccgcattcctcgtcctcccctcattcctcgtcctccccgcattcctcgtcctcccctcattcctcgtcctccccgcattcctcgtcctccctgcattcctcgtcctcccctcattcctcgtcctccccgcattcctcgtcctccccatgcccgtcatcctccctgtattcctcattctccctgcattcctcgtcctccctgcgcccgtcgtcctccccgctcccctccttctccctgcattcctcatcctccccatgcctctcgtcctccccgcaccctcgctcctgctgtcttccctgtgctcttcttcctcgggtgtgctcgtggcttgtggttgagtgtcccccatgggcagggtttggggaacaagtagaaaatgggggtttcttttcccaaaagtttcctaggttcgctctcctgtgtgaacttccatttgggttggggtgctgtgcccgccggcgggtgttctgccatctggagggaatcgtgctgaccctgtggtgtccccatcccatggggtggtggtgggagcgcagggggacccgcagtggtcaggccgtgattactgtcttataacaaactcttaagaagccgagagatttctggcgtcccgttgacatctgggctcggcccaggctctcacagttcctctccaggagctgccagcctcgctgccttgtcaggcagccccagccctaggctcagcctgctctggctctgggcacagcgtgcaggtcttgaccaggagggactcctcccacaggctgcccactggttgtgggatcttgcactgtctctggcctcagcctgttttccctttcctgggtctgactcacgatggtggtggctttggaggtgtgcatcacggagcttccttccctgaacacccagttacccaggtctttctggctcacaccgctcagccaccttggccacctgagctcagccgacctcacgtctagcctccctaagtgcggtcctgagtggggaacacgggcagcccaaggagcctcgtttgaggatgcctggcctgggaaagcagtgctgggcctgcaggggagcctctggttcccctgtccttgccagagtgtctgaaatgctgccaagggcgcctcacctgggacccgttgtctgcggtctctgcagcagttgagcgggagcctctgcttggcgccccctgttgcagtccagccccgtgctgggcctctgtttttggccacccaccttcttcccttggcctgtgggtacttcacggctgctcttcccaccttgtgtgggctgcttgtgaaccttcccagatcactggactccaagattcacaataagagacttggtcacgaatcctgccccctctgtttttggccccactcagaagaggctgcagttgccttttccctgcacctgaaacccacggcgtgcgctcagctgcgtgggcttggccctggaggtggcgggcgggtgtgggcagggcctagcaccgacagcagcggttgttggctgcgccgggtggctgtgcccgtgagacgagccttcatggcactgaactggagtattgttttgcagtgttatatttgtgaataattttgcctttggtcctgaggtggatcaccagctgaaggagcggtttgcaaacatgaaggaaggtaaggcgccctcctcgccggtctgtgctggtgtgacatgattgaggaagggtggccaggaggtccccgcagggtgtcctgcagaaggcagctcagacttggggtcttcagtccccttggagccaggtggtcttcctttatgcttttttttctttttttattgagacagttttcctctgtcacccaggctggagtgtagtggcacaatctctgctcactgcaacctccgcctcccgggttcaagcgattcttctgcgtcagtctcccgagtagctgggactacgggtctgtgccaccatgctcagctaatttttgtttttattttattttatttattttttgagacggagtctcactgtgtcccccaggctgtagtgcagtggcgcgatctcagcttaccgcaacctctgcctcccgggttcaagcaattctgcctcagcctcccaagtagctgggattacaggcacatgccaccatgcctggctaatttttgtacttttagtagagacaggatttcaccatgttggccaggctggtctcgaactcccgatgtcagggtgatctgcccgcctcggcccccgcaaagttttgagattacaggcgtgagccattgtgcccagccctggaatcttcttgagttgagcctacagcttgcttatggccagctgaccacccaggggcaagagtcccctttattcttgacctaagcacatggaacttggtgtccatactgagcaggagtggggctctcagctgttttgttttctccctccggagaaaggtcaccaggcccatgcagggcccttcacgctgttttctgaaccccaagccctggcgtagtttcaggagcggagaactcagcccatgacatcgattccagtcctgcagtcgagggtggtacccagaccacactctgtggactgcccattccctaaacatggagactgagcctgccattgtctcccagcccctgccagccctccagcaggacatagggcaggtttggggtcttccttgaggggattgtgctgcctgccttcctaggctctccaccaagccctgcagcaagcaccacctcatctgtatcctggcggacgtggcttccagagccactgctgggctcgaagacaggcgctctgggggtaccccctcttcctcccaactgctccccacctgtcctctctagggaggcctccagaggctaggggagaactgcggtgggctcctcaggcctcccaaacaaaacccagagggtctgcagctgccttcagcaccaacgccccacaacctgggggtttggagggtgcttgtgtgcctgtgtctgtgtgtgcgtgtctgtgtctctgtgcatgcctgtgtctctgtgtgtgcccgtgtgcctgtgtgtctgttagcgtgtctctgtgtgcgtgcctgtgcgtgcctgtgtctgcatgtctgtgcctgtgtgcatgcctgtgtgtgtgcgtgcccgtgtgcctccgtgtctatgtatgtgtctgcttgtttgtctgtgtgtgtgcatgcatgcctgtgtctctctgcgtctgtgtgccttgggagtttgtttgcatatctgtgtgtgtgtgtgcgtgtggcagtggtgtttctgacttatcttagaaccacgtgaggacaccatgcttccccgcccagtcgcccccacaccccagcagcactacgggcctccctgcaccctgcagctgcatgcaggaaggcagcagtggcttcaggcagctcctgtcaccccctccatggtcctcgtacccgctgccctagaacgcctcttctggctgtttctcgccagctttctctgcacgatcagacgtggtggctgagtcagggtactgcagtggcgtcttctgtccggcccctccctgttttgaacatgtccagtgaagggcaggtggccagtagtgctgattctaggggccttgatggtcccagacatgcccatgagcatttgttagcctggctctgcaaccattagacgtggccctgctcatgtttgaggtcctctggtagggatactggcctaacctgtgtgcccagcctggccctggaaccgcccttcctgctcctcctgaggggagtggtgtgtagaatgccaggcctgggctggtgtggcgtccaggggaggagagctgggatggcggagtgtgcatgtgtttaaatggatccactttgacttttaatttttttttttttggagacggagtctcactctgtcgcccaggctggagtgcagtggcgcagtttctggtcactgcaagctccgcctcccaggttcacgccattctcccgcctcagcctcccgagtagctgggactacaggcgcccgccaccacacctggctaatttttttgtatttttagtagagacagggtttcactgtgttagccaggatggtctcgatctcctgacctcgtgatctccctgcctcggcctcccaaagtgctgggttacaggcatgagccaccgcacctggcccacattttgacttttatgattaccttctttatatgtgtaaaaacagaaggctctgtttctctcggtcctgcgaagttcggctcctgacaccaagttcttcctgcagcacacacaagatgccccatagtggctggtgatagtgagactgacgcttagcagcagccttgcaggtgcctggctgacttttttgtatttttagtagagacggggtttcactgtgttggtcagactgaggctgaaggtgtccatccggtctgtttgtctttgcatttatcactgacagtcagttagaatcccagggttcagaggtatttgaaataattcttttcgcatgactgtttccagtttgcatctacagttagattttgttcctgcttgtgtacggcttgggggtttgctcttcctgcctctcaaaccttagttttttgttttgtttttttttgagacagggtcttcatccttggcccaggctggagtgcactggtgtgatcatagctccctgcagccttgacctcctgggctcaagtgatcctcctgccccagcctcccgagtagctgggatcacaggcatgcaccatcatgcccagctaattttttattttaattttttgtagagatggggtctccctgtgtcccaggctgggctggaacttctggcagtctgcccgccttggcctcccataatgctgggtttacaggcgtgagcctgtgcgcctggcagcgtagtgggttttttttttcttttgaggcagagtctctctctatcgcccaggctggagtgcagtggcgcgatctcgactcacttgcagcttccacctcccaggttcaagtgattctcctgcctcagcctcccgagtagctgggattacagatgtgcgccaccacacctggctagtttttgtatttttttagtagagacacggttttaccctgttagccaggctggcctcgggtgatccacctgcctcagcctcccaaagtgctgggattacaggcatgagccactgcaccgcgccgagaatgttttttaaagaagcattatttgtaggaggttgggcgtggtggctcacttgaggccaggagttccagacaagcctggccagcagggtgaaacccgctctctactaaaaatccaaaaattagccaggtgtggtggtgtgcgcctgtaatcacagctactcgcaaggctgaggcaggagaaccgcttgaaccagggaggtggaggttgcagtgagccgggagactctgtctcaaaaaaaaaaaaaaaaaaaaaaagttatttgtagaataggcttcaacttggaaggtgtttcctagtgttgcttgtaggcaggtggacaggacccggagcccagtgtgtgtgtgttccgtgtcattgttccttctctgtcaccttgagtggtgtctgctcttctgtttcctctctcctgtgtggcagtaagcagtgtctgtgtttcaggtggcagaatcgtgtcctcgaaaccctttgcacctctgaacttcagaataaacagtagaaacttgagtggtaagaaactctcatgttgttaatgatgaacacgggtaattttaaccatctgacacgcagtattcctaggtccctcttccttgaccctgtggacactggggctggatccttctgtggggtggggctgtcctgggcagtgcagggtgctgagcagcgtccctggtgtccacccactccatgccaggagcacccctggtcgcgacaaccacacacgtccccatagagcactgtgtgccatgggggtagaatcactcctcggggagaccccggcttcgaggggaggcgtgaaggatttacaggacttttgtggacagagacaggcccacggtgggaaggagccggcccctcccatgccccctgcctgccttactgtgctgcgtgctctgtcagctcccagccttgcggggcagcacggcctcctctgaggggcttccctgaggagcgcccacccgggaggtgcctgtgttgctggatgctggccgttcttgcagccgtgatctaagtcgcttccagatcttctccccctccttttccattccactcagctgggtttgtggctgtttttctgaggttggaggggcccaggccaggtggtgttgaatggtgcacctccctgggccggcctctgtgggccactgtggcctgacgcagtgtgggagaagagggaagacgcgcagctcaggcttctgtccccacgcctgccctggggtgggtgaggtctgcatggaggggctgtgggcaggcgcaggccccggcctcacctgtggctcctgcagacatcggcaccatcatgcgcgtggtggagctctcgcccctgaagggctcggtgtcgtggacggggaagccagtctcctactacctgcacactatcgaccgcaccatagtgagtatctcgctgcgcctcagccgcagggccgtcctggtcttccaccccgcccacgtcacactgctctctcctttctcatgtggcctctgagaccctcccctcagagccctcaacgccccccggcccctgagctcaggcccagctcctcaaggcccctcagtactgcttgcaccgcaggacccaccagggtcctcccaggcactgggcgtgtcctgggtgagggctgagtgctgtctcccctagtctacgctcagctcctggggtggggcggggccatcagagtgatgtgtgaccataagggtcccggccgccatatccagaggcccctgtggataggagtcccacgtccctgttcccagcttcctccatgtgagagggtcctgagcggggagacaccagggtccatgggtggggtctgggatgcttcttccctccctgtgttccccagggtcctctgacacagccctgggccagtgtgcggcctgcctgcctcccacggtgcttcccccccgggcacgagtatcccgagcctcctggcatgtgggcagcgccagccctccagggctgggaggcttcccctggtctctttcccgtcctttggttgggcactctgttcctgttgttggggtagcggtggttttccttacggtggtgctggtgtgtctgcaccctcactgtccagtgctcggagcctccactagagcctgcctggggagcgctggtgccgtctggggaccgacagccccaggcagatgcaccccgccctcccactgctcccccgagggccctgggacgagaggcatggtgagctgaggctgaggctctgggggcttggcctaccgtgcggcccccacctccacgcagtgctgctgcttcagctgccctggcactgacgccctcggcgcagcctctcgccttctcctctgaggcgggcgcggttcttctgtgcagaaagccctccctcttccagaagcagagacacatcccagggccctgtgtctgttctgaaggcttaaaccagccccgcccacccgtcgcgtgctggtgaattgagggtgacgcctggccacagctgggttagtcacatccgcgtttgccactggggggctctagctgcatgcctgctgtccccagataccagaacagcctccccagccactgtccaggttgctgttgttacctgggtgtccagacaaatccgaacagagattgggactcccttctaatcagggttctctttcttctttttagcttgaaaactatttttctagtctgaaaaacccaaaactcagggtaagtttgtgtgttttttctcttgggttaataacacgcatgcactgatgtggggaaatgcaaagccgtgcgcagccgggttcaggagccacgactggagcacagccctgccgcccctcggggcccggccctgtgccctttcccgcctccttcctgctcctccccactgtcactcctggtcctctccctaccctttcctccctgtcctccccctcttcctctcctctcccagcccttttctctcaccattcaatctctctctctctcccccaccctccctctccgtttctctctctctcccaccctctctctgtctctttgcctgtcttcatgctttgccttgtctttgatggtttggcctgggacatccttccccttgttaatacttatttttggggaggtggcttggcttagttttggtggtggggtgagttgcactgaagggctgggtgggtgaaaagcttgtgcgtcactgctggctgccccctcttgaggcctggggggccacacatgtgcgcttgtcccaccctcggtgcagagtgcagctcctgggcccccgcgccctgcacgcgctgcaccgtcggaggcagggctgtcccctcctctcccaccttaaagcagcggtgggaaagcctggcttggggagccacagtggccgccctgcccgctggcgcttctgcagcctcagacctgcctgcttatttgccaccaaagctgagaggatgtttgtccgggcgtcctttccttttggagggggtcagacaagaccagcatgcggagaaccccgtacaggaagggctctgtcactgcctggatttgtagccagggctgggctccaacccggcctcagagcctggtacccctcgggggccctctgtccttcccaccatgcttagggggatgtgggtcttccctggagagcagggaacggcccgaggtggccggcgcaccctgtgttccccttcccgtgggtcgcgccctccactaactcacatcagagaacttgtgcatggcgtcccatgtgtgggcctcggtgcctttcgaagagaggagagagggcaggggaggctgtgggctgtggcttctaggtcctgctgcctgaggggcttctcgtctcctgtcttggatgtggttctttttctctgtggctcacagtctggcttcttactgacaggcatctgtgattgtgggagtggctgtgaatgccgttatccgtgcccacgggtcacgtcctggcctgcggggccccaagcagcccactgctgtctctgggcctcagtttcctgatttgtgccacagaggacttgcagtggacagagttgggcccgtggcccccttgagtctgagctccgcgtgcctctcggtgcaggagggccgtgggcagcgctggggcttcctgtggctcaacctgctctccttccaggaggaacaggaggcagcccggcgccgccagcagcgcgagagcaagagcaacgcggccacgcccactaagggcccagagggcaaggtggccggccccgccgacgcccccatggtaaggccccagcctggctcctgctgctggagggcacccgccccctgcccgggagaccccatgggtgggaggctctgtgcccatccctgttcttcccttgtgtcctccaggactctggtgctgaggaagagaaggcgggagcagccaccgtgaagaagccgtctccctccaaagcccgcaagaagaagctaaacaagaaggggaggaagatggctggccgcaagcgcgggcgccccaagaagatgaacactgcgaaccccgagcggaagcccaagaagaaccaaactgcactggatgccctgcacgctcagaccgtgtctcagacggcggcctcctcaccccagggtgagccgcccccacgccacggcccccgctctccccgagtgcggatgcctggggtcccctctgctgggacgctgccctcctgagccccgtgtgttcagggtgtccctggagcctccctgttgtggctgtgccttcagggtggccccatcctaaggggttgctgggcacctgccccatgctgacgcctctgcccaccgctctcccgacccgccctgtgctgacgcctgccctccgctctcccagatgcctacagatcccctcacagcccgttctaccagctacctccgagcgtgcagcggcactcccccaacccgctgctggtggcgcccaccccgcccgcgctgcagaagcttctaggtgagcccgtgtgaggcgtccggcgaagggttctgggcttggggtcatcccaggaggaccgtgggttgtgacgctgacctcgcagcagcccccgtgacctccatgctggaccccactgaagtttacccagggttggggtctgcctgctgcaggggtcagtagaggctcagatgcagcctgtgggttgtctgaggtcttacccaggagatgctgggtgacacttgggacgtctgcagttgtcataacttagggatgttgctggcatggggtgggtgcaggccagggatgctgctcagggccttgcagtgcccaggatggccccacgcggtgaacacttggctgcgcaggggtcagagggcctgagtgctctgcgagcttggggcgtgtggcatgggccccgccaggctctgctgagctcctgcctcatgagtgcctgacacctgccgaggcctgggactcgttctcaagggctgctcccacctcttccctctcagtctcagctgctctcttctcacctgtgttccgcctctcttcccagagtccttcaagatccagtacctgcagttcctggcatacacaaagaccccccagtacaaggccagcctgcaggagctgctgggccaggagaaggtgggtcctggcccccttggcattccgccttcccgcacagaggcagttcgttcctgttcctgggcatctgtcccctgtggcagaggccctggagcgcaggcctgagtgggctccctcctctgctcacctgctgcgagaaacaaacctacccgtttaaacccaaagaatggactgagagacccggaaaacagcgaaaatgagacttttaatcatggttttgcaagacctggtgtctgataggcacacccagcacagtttgaacaagcaaccttccccctagtgcacaggtccctcccccggttcctcaaaggctgagtactgtgaggtcacagtcttcccagttgtcgcctattggttcggcaggggctggagtgcagtggtgtgatctcggctcactgcaaactccgcctcccgggttcacgccattctcctgcctcagcctcccaagtagctgggactacaggcacccaccaccacatccggctaattttttgtatttttagtagagacggggtctcactgtgttggccaggatggtcttgatctcctaatctcgtgatcctcccgcctcggactcccaaagtgctgggattacaggcatgagccaccacgcccggttgtaggtgttttctttagggttgtcctgctgcattttgtgcattgcaatcccagtcagctcagggactgttcaagtatttgacttatgatctaagtagctgggcaggctgattaagaacagacaaagccagctcttttgcaggctggtaaaccttcatcttaggctaaacttctttggttcgggtgagggcaactaagccgggggaagcgggggcaggggaggctgacaagcaggcatcagcgatccaagcaggggcctagtacatgctgtctcttctgtagtttgctgacctaagccaattcaaggcagtttgtcctggaaatggaccactgtatacatgatttccttcacctgaggtcccggctgtggggccccgccctgggagtctccgaggacctgctttagtggggagctagggccgggctatggggtggaagttctggcggcccagagataactccaaaagccattggagccacaaggtcggctgtccctgagccctggtttgcattttggactttggctttgcttttaaaaaaaagcttacagcgtgctttgagcatatatgcacatgcattgctcactgtgtagctgacagcatgcctgggccggggccctgttctctgctggtgtctgaaggttgtcctgtgtcagtggctcctggggtcttcccttggaggtgggcctccggacactgagtgtttgctgttacgctgcagaaggcttccttgcagatccatgtgaaaagtccatcccctggtattgccttgggataaactccttggcattggccggcctctgcgtggctgggggcgctgccctggctgagtccaggtggggtggcaggtgcagtccctccagctggcgagagttctttgcagtgaacctgatgcagagctggtcccctcccgccgtggcctgagtatttcttgacatctcagcccggtgtgggtcccctcaggcatgtctgtccttgagcgtgtcttcaggaagcatgagaggcagggcgtgggccctccctgtgggccctcagtcacctgccctggcccttagtcacctgccctgtttgtcctacaggagaagaacgcccagctcctgggtgcggctcagcagctcctcagccactgccaggcccagaaggaggagatcaggaggctgtttcagcaaaaattggatgaggtagtggaccccagagggcaggtggcaggtggcagctggggcgcaggctggggtggtccatgtccgtcggtatggcttcctgtggcttcctgtctatgcctctgtccagctgtgtcccaggggctgggctgcaggggtggtcatgcctgggggcttacttcaccttggaggccaccagcatgacctctcccccgccccatgtccccagctgggtgtgaaggcgctgacctacaacgacctgattcaagcgcagaaggagatctccgcccataaccagcagctgcgggagcagtcggagcagctggagcaggacaaccgcgcgctccgcggccagagcttgcagctggtgggtgccgcggcgcaaggacagggacgtggaaccagaggggccctgcctgggcgggtgtgtcctctgtgcgggtgggaggctctggaaggcccgcctctgttgtggggtttgttcccagacgaattgcgccacctgtgaaagcttgtcgagcgcgtcacagcaggcaggcctgggcccctcggctggatggtttctcagcggccctgggtgtcatggagccacactctggcaggctcgaggtgtggggtcatgcgagcatcccaccatcgtggtgtgggtgctggagctgcctcatctgtccgtggggggccccagtctccgcgtgttccgcatcctcagcctgctattccagaaacggggtctgtgccctaagcacacatgctgttggctgaggcaggcccagggaaccctgccctgagagtgtggggtgtgctgggcaggcagccagccagtcgcaactgtcccatccctatcccctcagctcaaggctcgctgcgaggagctgcagctggactgggccacgctgtcgctggagaagctgttgaaggagaagcaggccctgaagagccagatctcggagaagcagaggcactgcctggagctgcaggtgggctgcgcgcgaggctgcactccgtggtgtccgagcctctcccatcagcctccctgtgacgtcgttgagcctagggtggttgcggttgcagcagcctaggaagaaggtggaggaggacagttgggtggaggcttatggaaccttctgtcttgggccgcaggctgcccgtgtggatgactctgcctcactctagccctcagctctcgggggcatctcgggattgcttggctgaatgcgcagcgctaacctaggatttcctgatttcctggctgcctccttgcaaatcatttctgtaacagtcataggggagaatttgctcattagaaaaacagctggatcggtgcaggggcttatgcctgtaatcccagcaccttgggaggctgaggcgggcagatcacctgaggctaggagttggagaacagcctggccaacacagtgggactctgtctctagcaaaaatacaaaaattagccgggtgtggtggtgtgtgcctatagtcccagctcccagggaggctgaggcaggagttctggctcccaggatggcatccccaagggccatattgaggcaaaaagggccgtgtttgagcccgggaggtggaggctgcagcaagctgagattgcaccactgcactccagcctgggtgacagagccaggccccatctgaaaaataaaatagcttgtactttctgacaccgagaaacgcattcgtggaggccgagtagaggaagtgtggaggagggtgtgcagcgggaaggtgctctcctccctgctcccaggcagaggcaggtgctggtgggcggtgcccacagctgccgtgcagcctagaaagcagcaggtcacgggctttgttcccagagccccatcccgtcgacactgtgcccgcctgctcaccttacgtgtccccagcgtggtttcactgttgatggacctggtgccctgtcgctggacctctgctgccttttcaaatgactgcaccaaaccgttgctgcaaggctgtccccggaggcgggctctcacgggcggctgacggacgtcgggaagcaccactcacgtgctcccgagctgctccctcacgtgtgtggcccaggcgagcctcaccagcgtacattagagaaacggaggtcgccgacctctttaccacagccgggccctgtgggtctgcctggagtagagccctcgggaagagcatatttgggttctgaccatttttgtcatcatcttttctgtgtaataaaaaaacaatgtgtttgttaaaagaaaggaaagcaggtaaacagaacagataaactaaaaggaaaaagcccctctcagactcagcgcccggggaagctgccacgctcgagtggcgtgtccctccacaggttttacacttagtgaaactggatgttttacacttagagtctattttgagagacgagagctctttgtatcttcctgttgctctttttgaagaaggtgcttccatgtcagcaaaaaccatcctcggccctccacatgactttatttgacgcccccagcttcccgaccccgcctctatgtggtcggcagctttggtttttccatcccacacaagcagcgggggtcctggccacccctccgggtgtccatctgtggcagtcttggttccctggagtggtcccccggtggggcgggcctgacaccatctctcctcctgcagatcagcattgtggagctagagaagagccagcggcagcaggagctcctgcagctcaagtcctgtgtgccgcctgacgacgccctgtccctgcacctgcgtgggaagggcgccctgggccgcgagctggagcctgacgccagccggctgcacctggagctggactgcaccaagttctcgctgcctcacttgagcagcatgagcccggagctctccatgaacggccaggctgctggctatgagctctgcggtgtgctgagccggccttcgtcgaagcagaacacgccccagtacctggcctcacccctggaccaggaggtggtgccctgtacccctagccacgtcggccggccgcgcctggagaagctgtctggcctagccgcacccgactacactaggctgtccccggccaagattgtgctgaggcggcacctgagccaggaccacacggtgcccggcaggccggctgccagtgagctgcattcgaggtgagtgccctggtggggctgggggtctgcagctggtacctgccgactctgcctggtgtgctcaggctgtcgggttctcagcaggagtgtgtttgttgaggagactgaggtggggaggtgctgggccaggccgctgcctctgagtgccagcccacggccctcgagagtgactgcagcttctcattccagagctgagcacaccaaggagaacggccttccctaccagagccccagcgtgcctggcagcatgaagctgagccctcaggacccgcggcccctgtcccctggggccttgcagcttgctggagagaagagcagtgagaaggtgcgggccgcgacccctgccccgggctcagggaggtgctcagcagaggcggcctgagcgagttgctagcaggagggcttgtcctagttgaccttggggcacggtgaggtactggggctgacctggagtaggatgttgtggcagagttgggggcaaccagtaaggacaggtcacaggtgacgttgggcaggtgccatggaggacatggggtttgtcagggtgtccctgatgcctcttagttctcagtgacggacggcaagtgctggtagagacacagagcccagtttgggaggccgctgcccatgaggacttccccgggggcactggcctgtgtgcacagggatggagagggaaggacggtgacgttgcatggacttggcagtgatggatgtgggccctgggaggcttggtggccccacgggtgactgcccaccgagccgggcgggcaggctggaggggacagatgggcattgctttcagacaccaggagcgtgccgtccctctggagtgtcccaaagccggtgtccaggagggcctgactgcgtggggaaggttgcagggccttggcagcgtgggggccgccttgagagagctgtagcaggcccccgtcctgtggctgtggtccctgtgtcctggaggggtttgttgacccacgactgggggtcgggccttcgtctgcagggcctgagagagcgcgcctacggcagcagcggggagctcatcaccagcctgcccatcagcatcccgctcagcaccgtgcagcccaacaagctcccggtcagcattcccctggccagcgtggtgctgcccagccgcgccgagagggcggtgagtggctcccaggtggctgtccccaagggccacgttgaggcaaaacagtctggggtgctcgagacctggctcactttgcgaagtctcacgctgtaaaatgtcgagcgtgaggcaatgcagtcaaggtgggctgtccaaagccggggcgtgtccggtgacctgggccgttgttttcgccagtctttttcttttgggtgaaaggtacgtgtgcaagtggagagggcctcacaccttctgggttgaggaggagctcagaggcccaccctggctcccagcctcactcctcacgaggccacattggctgccgtggcccctgtcctcacagctgcctctgggttctcccacccagcgctgtgcatgcagagaatctcgtcttgtgtagcatgggcgggattttctgggcattgaactattttttaaaaattgtgcgcttcaagtatatgcttcagtggtttttagcatttattttttattttttatttttatttttcagacggagtctcactctgtcgcccaggctggagtgcagtggtgcgatctcggctcactgcaagctccacctcccgggttcacgccattctcctgcctcagcctcccgagtagctgggactacaggcgcccgccaccacgcctggctaattttttgtatttttagtagagatggggtttcaccgtgttagccaggatggtcttgatctcctgacctagtgatccgcccgcctgggcctcccaaagtgctgggattacaggcgtgagccacgacgtctggcctctttctttttttttatttttcgagatggagactcattctgtcccccaggctggagtgcaattgtgtgatctcggctcactgcaatctctgcctcccaggttcatgccattctcctgcctcagcctcccgagtagctgggattacaggtgcccaccaccacgcccggttaatccccgcccccaccagctgagacggagtcttgctctgttgcccaggctggagggcagtggcacgatcttgtgatctttactcactgcagcctccgcctgctgggttcaagcagttctcctgcctcagcctcccgagtagctgggattacaggcatgcaccactatgcccagctgatttttgtatttttagtagagacagggtttcaccatcttggccgagctggtctcaaactcctgacctcaggtgatctgcccacctcagcctccgaaattgatgggatgacaggcatgagccaccgcacccggccaatttttgtatttttaatagaggtggaggttttgccctgttggccagggtggtctcgaactcctggcctcagtcgacccacccgcctcggcctcccacagtgctgggattccaagtgtcagcccccgtgcccggccggttttttgtacttttatacacctctgtctaattcaggacattttcttcacccgggaaaaagcgttgcccgcctcagcagtcactccctagtcgtcccccagcccccgggcccccgaacacgctcatgtctgggcctgtcccttctcttggcacgtgagggcattccctgtgtggatggagtgtgccatcttcatccgtgcccagttgatggaccccggcttgattccctgttttggcgattgtgaatcgttctgctgtgagcgctggggtccaggtttctgtgtggatgtaggtttgctctttggcccatgtgggagtggagctactgggttctgcggtcactctactgacctttgttggacttggagtgtggtgtggggaagtgcagtgggtggtggccggcaggtgtgttctcgcaagcgccctcctcaccccacccgactgctggcatttgtgctgcttggagaacacagccgcttcccggtgagggcgggctgtgggttgcttgggttgtgcccagtaccccctccccacagctggaccccgggacccccgcctcctgacctccctgcctcaggcccgctgcccattcacacgcaggcaccgcgcactctcgctgcgccactcgcctggggccccgctcaagttcccccgctgccctcttcccacgcggtactggacggtgaccccggcggcctcccccagccagctgcaggcctcaacactcactgtttccagctgggttctgggtctcctggggcacctgctgcccctgacacacagggttttctctctgcagaggagcacccccagtcccgtgctgcagccccgtgacccctcgtccacacttgaaaagcagattggtgctaatgcccacggtgctgggagcagaagccttgccctggcccccgcaggtaacgcccctcctgtgccctaccctcaggactctgctgctgctgctgctcttcaggcaggagggctgggttgctgggagtggaacagggcttcctggggtgatcatgggggctgctgccccaaaccgccacgcctcattactgacaccctttcctgcatcccacgagctgggatgcggatcgggctcagctgcagccatctcggcctcatacctgggtctcccgacactgacacctcctgcttgggtgtattaattcagcccgtgaggtcggccccagtgctctcgggggctcctgtactcacagctgggaggcccctgactcaggatcggctccacacacagcagtgcccaatggcacacgaccgtgggcctccgtgctggtagcggcatggtttctggttccttgagaaggtgccgcctgagcagtctctgctgttagcccagtttctgcagagagccagagaggatgccactttggcttttgttgacactgcaggcctgtctgttgtggaagccgcagagacagcatgtcagcgggcatggctgtgtgccagcaaaactgtacttaaaacagcagaggacatgagacccccaggctggtttgctggccccaggttgagatgcggtatgatgcggcagctacttttttaggagtaaaaagtaaaatgtggccgggcgtggtggctcatgcctgtaatcccagcaccttgggatgccgaggtgggcggatcacctgaggacaggagtttgagaccagcctggccaacatggtgaaaccaccgtctgtactaaaaatacaaaaattagccggatgtggtggcagacgcctgtaatcccagccactcgagaggctgaggcaggagaatcgtttgatcctgggaggtggaggttgcagtgagctgagatcgcaccactgcactcccgcctgggcaaaaagagtaaaactccatctcaaaaacaaaacaacaacaaaacaagtaaaatgtacatggccgctattgagacaggaggggctctagggaggctgggcaggcttcacggttggccacgtgagggccctggagaggccaccgaagcccgggcagttctgccctcgcagggctgggttgtgcccttggggtgaggtctgctctgcgagaggcagtgacagtttcaggagattttcaactgggtggcaaacagccaactccagaagcgccttgctgcgcccctgcactgaggcctcattggcagaagcagggaggccgccctttgtccccgggtggtcatggaagtgcaccactcatcgtgggctgggaagcatggctgcggccttcaaggcggccatagcttggagtatccaagctgagttgtcttctgagaacaggagggagggaggccacgcagccatgggctttcctcatggtgtctctgagatcacggggccagagggcaacttactcagaggaagcctagctcagcggggagcccgcaccaggaggcttcttgggaggcagcgtctcagccgggacctgcagggcacaggcagcccagatgggcgggaggaggcacagggtcagccctgagccttgagcttgcccacagagccttctggttccaccccagaggggccgttttcagactcccaaccccttccccacttccccgcctctcctggagcccacagagctcctagggggtggtgctcccacagcaaggctttctctttggccatcctgtgtcccctgagacccccatgtccttcccggcaggcttctcctacgctggctcggtggccatcagcggggccttggcgggcagcccggcctctctcacacctggagccgagccggccaccttggatgagtcctccagctctgggagcctttttgccaccgtggggtcccgcagctccacgccacagcaccccctgctgctggcacagccccggaactcgcttcctgcctctcccgcccaccagctctcctccagtccccggcttggtggggccgcccagggcccgttgcccgaggccagcaagggagacctgccctccgattccggcttctcagatcctgagagtgaagccaagaggaggattgtgttcaccatcaccactggtgcgggcagtgccaagcagtcgccctccagcaagcacagccccctgaccgccagcgcccgtggggactgtgtgccgagccacgggcaggacagtcgcaggcgcggccggcggaagcgagcatctgcggggacgcccagcttgagcgcaggcgtgtcccccaagcgccgagccctgccgtccgtcgctggccttttcacacagccttcggggtctcccctcaacctcaactccatggtaaggatggggaccggcagggctggggagcgcggcctgtgaaagaaagaccagagggagaccgggcgcggtggctcacgcctgtaatcccagcattttgggaggccgaggcgggtggatcacaagatcaggacatcaagaccatcctggctaacacggtgaaaccccgtctctaccaaaaatacaaaagattagccgggcgtggtggcgggtgcctgggaggctgaggcaggagaatgatgtgaacccgggaggcggggcttgcagtgaactgagatcggccactgcctgggccacagagcgagactccctctcggggggacaaaaaaaaacacaaaaaaaaacaggtggaggcagggggccatgactgagcccggccatcctccaccacgtgcggcctggcagcctgggaagaggcggccgacagctgtctctggggttcggagtgcgatgcgctgcctgcaagcttcttcattctcggctgtggggccttagtggtggtgggcacatcaggagggggcatggggggctctgggattgcggggtggtgtgtgaggaccaggaagaaccaggacaggggctgtactggccgctgggcagggcatcagtttcctcaggagaccctggggtgcagacaggagcctcctggggcgggggggctctcctgccttggggtcccgggtctgtggtatgtgcatccattgtgtctgtctgccctcaggtcagtaacatcaaccagcccctggagattacagccatctcgtccccggagacctccctgaagagctcccctgtgccctaccaggaccacgaccagccccccgtgctcaagaaggagcggcctctgagccagaccaatggggcacactactccccactcacctcagacgaggagccaggctctgaggacgagcccagcagtgctcggcgagtccaggggcccggaggggggcggggcctggcagcaggggcaggaggtgcctgctcactgtgtgtgtgtgggtgggtgggtggggaggaccggcaggctcttagggggtgccctggatgggaggaaggcgtctgttttgtgaggggcctccccacaggtcctgggccccgttccgggcagggccggcctcccgggccattcggggtgggacacgagcagggccatcggttagaagaggcaagctgaggaggagctgagcgcagcaggagagaagcttcagcagtgaggcgttggaggtctcatccacacgtcttgccgagtgtattacagtagctttattagataaaattcacatatcgtattctccatttaaagtgtgcaattcagaggtctttggtatatccacattaccactgcctaaatccagaaccttccatcatgtcctgagaaaatctcatcatccccttgaaacactcactccccttctcctcccaagagcccctggcaccccccgcccccatcctactttctgtctctgaatctgagggctctagggacctcctaggagcggagtcacacaggatgtggccttttgtgtctggcatctctcactgagcgtgacgtcctcaaggtgcatcctcggtccctgtcgtggctgggtggtgctccaccatccatccgccctccgtgctaggcttgcttaccctgggcggttgtgagcagcactgctgtggccatgggtgtgcgtgtttgtgtttgggagcaagtttcccgtttcctggtgcctgggcggaggtgctgggtggcccggccccctgggctctccagcagccacaccattccaccctgccaccatgggtgcacgagggtctgaggtcctcagtccccacatcctcaacacactgaatttcttgttttgattctagccatccgagtcgtcgtgaagtgatataacatggtagggttttttgcttttttttttttttttttcctgagacacagagttttggtctgtggcccaggctggagtgcggtggcgcgatctcggctcactgaccctccgcctcctgggttcaagtgattctcctgcctcagcctcctgagtagttgtgtctacaggcacacgctaccaccgtgcctcgttcgtttttttgttttatagagatcgggttttgccatgttgcccaggctggtctcaaactcctggcctcaagccttctgcctcccagtgcctcccagcgtgcgccatcacagccggccctaagtgtgcttttggtggtgttctgtgttagttcgttctgctccttgcccacgtgtgcgtgcacgtgttacacgagaaacattgtagcacctggatgctctgttttgcattgggattgctcagcttagtggtttccaggatctttaggaatttgtgtgtccctggtgtgttcttgggacattggatcaaagcgaccccatgcagtgtgtggttgggcatgtcttcacgtgctggcctgcaatgctgtggcattgtttgccacctgaggcaccgaggtctgagaggggccgggagagggaggtaggaagagagctctgtctgggattctcacacttctgtgtgctgggaaattgcttctcccattcagctgctgtgcctgatctcttggctgcttgtcccagcagaggccctggagtccctgccaggacagtacccttgtggcacaacaggggtggatcccagggcccagccacccagtccaggcctggcccagggtggctgcacgggtcccctgtctgggccgagtgcttctcgttcaccacctccggagctccctgggctgttggctgtcagcatttgtgtcattcttagtatgcagctgggtttcaagcattaatgacctttttttcttaacagaattgagagaaaaattgcaacaatctccttagaaagcaaatctcccccgaaaaccttggaaaatggtgagtaacaagtgttttgcggcgtggccaggcctgtccgtgtggccgtggtgcccagtcagtgctgctgacccacctgctggcccgctgcatcgtgtcccgcatggtgctggcccgctgcgtcgtgtcctgcgtggtgctggcctgctgcgtcgtgtcctgcgtgggcgccgacactgggggcgctgggcttccagaactgcctctgggaggccctcactgcagcccagggcctccgcgcacacgccatgctctcacagtgggtggctgacctgcggggatcgtcaccttgggtcccctgtttgctttgcaccctggccttccccccgagtggtgcctgcgtcctcagtgaggaccctgacctgctctggggcagccccaccttccctcccgcaggctgctgacctcagcattttccccagagctcatcccgcatggcctctgagacccgcttcagctgcctctgtcctgtcttccgccctcctgtcccatccagtcccgtcccctgccatctcatcctgtgctgtagtcctcctgtcccatcccatcttgtcccctcccgtccccttccctcctgtcctctcccatcctgtcccgcttggcatcttgagtgtctgtgaccagccctgcctgcagagttgcccgggccgtggcagcagccccggttagcctcatgggtagcccgggcaggtgctctgggctcacggcttctgcctttcctctttgccaggtggtggcttggcgggaaggaagcccgcgcccgccggcgagccagtcaatagcagcaagtggaagtccaccttctcgcccatctccgacatcggcctggccaagtcggcggacagcccgctgcaggccagctccgccctcagccagaactccctgttcacgttccggcccgccctggaggagccctctgccgatgccaagctggccgctcaccccaggaaaggctttcccggctccctgtcgggggctgacggactcagcccgggcaccaaccctgccaacggctgcaccttcggcgggggcctggccgcggacctgagtttacacagcttcagtgatggtgcttctcttccccacaagggccccgaggcggccggcctgagctccccgctgagcttcccctcgcagcgcggcaaggagggctcggacgccaaccctttcctgagcaagaggcagctggacggcctggctgggctgaagggcgagggcagccgcggcaaggaggcaggggagggcggcctaccgctgtgcgggcccacggacaagaccccactgctgagcggcaaggccgccaaggcccgggaccgcgaggtcgacctcaagaatggccacaacctcttcatctctgcggcggccgtgcctcccggaagcctcctcagcggccccggcctggccccggcggcgtcctccgcaggcggcgcggcgtcctccgcccagacgcaccggtccttcctgggccccttcccgccgggaccgcagttcgcgctcggccccatgtccctgcaggccaacctcggctccgtggccggctcctccgtgctgcagtcgctgttcagctctgtgccggccgccgcaggcctggtgcacgtgtcgtccgctgccaccagactgaccaactcgcacgccatgggcagcttttccggggtggcaggcggcacagttggaggtaggcagggcggccgtccgtccgccccccgccccggcccccgccggaggccccttcctttgcaggttcccttccgcactctcttgcagcaggagctgagctgcaggtcccctggtgccggccggcccccgccatccgtgcacggtggcgaactccagtcctgtggggagagggctcacgctgagtccgtgtgtcttgggttctctggttgtaaccgcgtccctcttgttttcagaaggccaccgtgcgcagggccaccagagcattactttctcccgtggaggtcacctgctaggtgtggccgcccgggctctggcaaggctctgggagctggtgttgggtaagagcgagtccccgcagtgcctgcccagacagggcggagaggagccgccggggggagcggcctggccctggggctgctgcggggcggggggccggagggcggagggcgggccaccacgagcctggccgagccgctgcttgtgcttggtgcccgcacacgcctggcggcgccgtttcgcttccctttttgtgagcctgcggctgctgctctgcgcttgcctggatgctgccgcttgttgaagctgcgtttttctctcctatttgcaggtgtctttaaccacgcggtgccctccgcctctgctcatccgtttggagcccgtgtcggccgcggggctgcatgtggcagcgccacactgggcccgagcccgctgcaggcggcggccagcgcctcggcctcttcctttcaggccccggcctcggttgagacccggccgccccctccgcctccgcctccgcctcccccgctgcccccgcctgcgcacctgggccggtcccccgcggggccgcccgtcctccacgccccccctccacctaacgccgccttgcctcctcccccaacgctgctggcctctaaccctgagcccgcgcttctgcagagcctcgcgtccctcccgcctaaccaagctttcttgccccccacctctgctgcctctctgccgcctgctaacgcctctttgtctatcaagctcacctccctcccgcacaagggcgcccgcccctccttcacggtgcaccaccagcccctgccccggctggccctggcccaggccgcgcccgggatcccacaggccagcgccacggggccgtccgcggtgtgggtgtccctcggcatgccgcctccctatgccgcgcacctttcgggggttaagccgcgataaagaccttgcttagctagcagtgcgtattgtgtaaggtaaggccagagccctgcgcggtggctcactccagacactgaactgtccttcctttggcagagaagacggccacagggctcggcagaagttccgggggtcctgaggagggaagagggagagagccagggagaccagggagatggtcgcgagaggagggactacaggacgggcaccagccatggagtggcctgagtgtgttgggttccagctgcccgcagctgggttcctgcggtgacgccgcaggactgaggccagccctgggggcagctgtgccagcccctgtgggcgaggctcacggggtgccaggccagggggctgggagctctagctcctagagcagtctccagggctccatccgcaccaggcccaggtcactcatgacgggtggcgtggcttggtgctgttccccaggcgcccagcatgtagcaggcacggtgccggctgcagaggtcctggagagccagggtggctggctggatgcctctggtcggggctgtctggccagtagcctcggatgccctcatagggagccagtgaagccccaagtgccctgcctgcctgggggctgatgggttcccggcggggtcgagaggcaagctctgtgccctgcgtgttgaggcccccttgctggacacggctgatggccacactgccctgtggtcatggcccacagccgaggggctttcagctgctcagatgtcagcaccaagctgggcaggttagtgtagacggtgcccacctttgagaccagaaggaagttggaagcaggagtgattttgatgatgtgaggccttcagggaatgtcctgttcactcctcccccaagaggctgtggagactgtggccgctgacccctgagggcagttggccacccgtgccctccagggacatggcgtgcctggcggcgtagtgcaaaggtgccctctgcttgcccctggccttctgcctcaggggcccctgggacacaggccttcctgggcgagtccaaagcccaccgggcaaggagaggaggactgggagccaggagccaaggcggaggctgtggccagggctggtcagcctggcgggtcaatgcgggcacctgcgggctggacaagctatgctgggtctcttaggagatgagctgcaggtagggtggctttagctggactcggctgtgtgtctcctttggaggaaggctggagcttggccggcgtgtccaggtgtcaggctccctggtctgtcacggggcacgcccgtcgtctgttgtggttagaggagctggcactatgcctgtcatggtgctggccccaggtggcgtgtgtgctcgtgggaggcctcggtccccagcctgggtgagtgttgggctcccccaggcgcgatggtaacctcaggccgctcttcccgctgtgcccttctgcaggtaactaggatttctacctcaaccgcgagacctatgcaaggacggtgtggaccaactcgcgcccgcggcatggtgcccgccggcctgccgggctcccacccctggacggcagaggcaaggacggacgggagctccactgtgaatcggcggcacgcgccgcaggaggctgggactggtccagtttgtactgtcgatagttttagataaagtatttatcattttttaaaaagtataaacaattctgacttattttattccatctaagtggtaaaaggcaacttattgagaaatataaatatctatatatgagagctctatataaagacacgtgtctgcagggcgggcccgccagcggattcgccacagcctgccccggtgctatctcgtccccaggcccgcgcctgcctccacccgcttggtgctgactagacgctgacaacgccgaaccccgttctcggaaacgccgcccggccggctcccccgacgcgctgctcccgtaccaaaggcaggcccgtcgccaccacattcctcggaggcctccccgcggcctgagccccttcctgagcgccctggcgcctgccctgagctcttcacctttaccccggcactgtgaacccccagactgttcaccctccggggcgtgggttgcgcccttgcatgtgaaggggcctgcgcggtgacgcagctggccatgtgctgcgcgatggtgctgtgaggacggcgcgggcacgttgaacaagtgcatttacttttgtatttctcggctgtccatggctcgcagcatgccctgcgatgcggggcaggcctgtcgtgggtcccttggtgtttctgtacaggagagagtcacactaatgagtggcagtattttatagagatgtgatgagaatttataaatttcatagatttgacagcttttatttttagatggtataatgcacagtgaagaggaaagaaaagcgaggggaaaaaaccttatttattcaaacagtgcacaaaatggccccagcgtcagccccgaccctagacccctcagttgcagctcccagcagcccagacagagctgccggcgcccctgcctgccccacatcccttcctgtcagggccacgcctggcacccatcccttggagcctgtgctggttctcccagctgctgtgggtgtgctggggccagggtgcactgctgaaacctggcctctctggccctaggccccagggtgacgtcggccccccactctgcagccttggcgggtgcctgggactgggtgtggaaggagaggagctgaggccggggtgtagcaggcaggcagggccactccagtgcttctggagccctgagcagtcagggcctgggttgtctgagcagtggtggctctgtgccctccctggaggatgggatctgggagtctgagctccccgcatctggccctgggctgtgtggcacttgctgagcccaccttctcaagtgcttgctcctgtgagatggcatcggggagccccttccccaaggtgccacagatccaccctccagggagctgccagccctgtgttctggttcccaagggcaggatggacacacgtcacatccctaccacgtggcctccaaagggagccacggaggaaaggcttctgtggttgctaggtgggggagtcctgtgtgggagggcctgaagacccctgcttgtgcctggtgaggggggtgctgcctcccccagcccccaacaacctctcagacccccaccctccaacatagctgagttctgaagatggtgctccggacctgtcctcttaagtggtgcccagtgccctccccaccccacgttggtgctctcagctagaaggtgctgtgcctctgcctgagccccaagccccgagcctggccttcaggacaggcagcctgctctgtgtcgccacgggccggatacgccacagggttgatggcagagacggccgagtccctggtctagaacaagacacattctttaaacactgtattacttctgcctccctctaggtgacagtggcagtccgggtgccatcacgggtcctgcagatggccatgcagggctcctgcccacgcaggccaccgtatgttcaggacacgcactgggtctcagagccactggcccaggcagaagtctccttgagcccactgggtcatatgcgtgtcaccacacgtgaactagtgtggtggctgcctgcggacaccctcctgttctgagccctgggcctgtgttcttctcagacactcccagactgaggggtggtgtgtggcgggtggcagggtggctgtggagactggggatctggagcctggtgctggcacctggcctgagtttccgtgggcagctggcggggacctgtgctgctgctgctgactgtgggtgggcgggcggcgcctgggagtggctcttgctcaggaattgataggaaccctaaaaactaggataccccctcctcggcccatgaggcacgcacagtgacttatttaagacttcccccttaatttatctgcccccaggatgcgtcagtctgttcagtggtcagcaggccccccaccccccgccgactgccctcgccatcgtggtcagacccccctcccaacacaacacgctgctggtctgtgtcagcctttgtaacgtgggaggctctgccgtgtcttccgggtgaactgtatttggattgcgcgcattgtcacggtccgcccctgggctgcaggcgccccttcctctgggcacccctgcattctgcatccccacctctagacgctgtaataaacagactgttttcactcggacctggtgtgaatggcagcctttcttccaggtggcatgaggcgtctcctggcggccagtgagaggccccggctagtgtgtcatcgccgaaacggggagtggagggcctaggggtgctcctagcagaagctccgggggctgacaccaggacaccctggccttggggaggcttatgagggcaccaggccacaggcaaggggaggcttatgagggcaccaggccacaggcaaagtgccttttgatgaacggaaaaccagatctgcgaccccaatgacatcggcaaagtccttttcacatcagatggaccaaagcccgcccaggccccagccacactccgggagggcccgtgaatgccagaggcaggaccccaggtcaccacaggattcctgataccacacagcagctctgttctccccaggcctgggtcccagcctccacctgtcctggctgggggttctagctctcccctcagtgcaggaggcccagccactgcctctcaggaccctgagccttacttcccttgggtgggggctccctggctgcccctcccctctccttcacttcaccgccatccagtgtggaaaagaggtacctttatttgaacagaacaagcaccctggccccagggcaaccacttccccaggtgcacagccagggccctcctgtctgcaggagaattcacagctggtgtgggactcagcccctaggccattcacagctttgtctggctctgtacattcattcagcacggggcaggggggccatgccaccagcctgggggctcaccaggcccctggatgcacacaactcaggcagggcacctgtgggaaggcgcatatcctggcggcagcagcacgtggcaccaggtgccaggccagttaggtggatcctggggccccagggagcgcagcttgctgggcagtttcataaaatgcagcccctgcccacacccacctggcttcaggctttggatgtctccaaaccaaaaacctcccactgaaaatccaggtgtgatggccgggtgtggcggctcatgcctgtgatccccgctacttgggaagctgaggcaggaggatcacttgagtccagaaggtcaaggtcacagtgagctgtggcaccactgcactctagcctgggcaacacagtgaaaccctgacccaaaaaccaaaaaccaaaacaaaacagatccaggcatggccaagcgattcatggctgggcagggccagtcccgtcccgctgcacgctgaccaccgtgccctgcgctcacgcctgcaagccactcagctggaacctggcctcctcggatatgccgaactgttccagggggtcctgtggggaggacgggtggccatgagccagggctggaggactgcctctgccacctgcagccccaccccggccctctgcagccctgcacacaccttgcccgtcaccttccggatttcgttcctgtagaagatgaggcttctccgcatgaactcgtagctggggaaaagggtggcacggggtcaaatgcccgctctgcatggctgctgtgcccaccccagcagtgcccaccaccgcctggccccacctggcccgacgcagagcctccatccactcctgacactgctcctcgctgctgcactcaaagtgatacttcctctcagggtcctcaatgaagcctggggatggaacacctgtggtcggtcctacccacagccacaagcagcttcctcttgccattgcccataaactgtcccttctctggcccccacaaagatgtgttcatgtcctgaccccccagaacccatgagtatggccctgtatataaacagggtctttgcatataaactagtcaaaatgaggttgtcgccaggtgcggtggctcatgcctataatcccagcgctttgagaggccaaggtgggaggattgcttgagctcaggagttcgagaccagcctgggtgacatggcaaaatccccatctctacaaaaacaaaaattagccaggtgtggtggtggggccttgtaggcccagccactccggagtcagaagtgggaggactgcttgagccaagggggttgaggctgcagtgagctgtgatcacgccactgcactccagcctcggaaacaaaagatcctgtctcaaaaataaagagggccgggtacggtggctcaagaccgtaatcccagcactttgggaggccgaggtgggaggatcacctgaggtcaggagttcgagagcagcctggccaatatggcgaaaccccgtctctactaaaaatacaaaaattagctgggcatggtggcgcgtgcctgtagtaccagctactcgggaggctgaggcaggagaatcacttgaacccgagagggggaagttacagggagccgagattgcaccactgcactccagcctgggcgacataccaagaccctgtctcaaaaaataagcaaataaaataataaagtgaagtaaaaaggggttgtcagggtgggccctaaattctgcttggcgtctgtgtagaaggggaaatgtgggcacagacgtgatgcaaggaggacaaggtgacgcttccacaagccaaggaacctggaggatactggccaccactaggaactgggagattcccctcggcctcagaaggattcggccccacccacaccttcatctaggatttctggcctccagaactgtagagaatgtttctgatatttaagccacctggcctgtggaattttgacagccactctgggcaaactagcagggactccatctttccccgcagaagggaatctcttaagacccaggagaacacccccctctcactcctcctacccccacctgggatttccagcccggggccatataacaatgctagacccatgctactcttggcagctggggaaacgctttgggtggggctggcccacctgccctgtaagtacagcctgggcccacagggaacaaagagcagagtctgggagggacccaagcttaagtggactcggcaggtgggaagggtggtgcccgccaggagaacttgaccttgagctgcccgtggacaatgcactcttgtgtttgaggagggtggcgccaggctggggacacagaggagaccttgggcgcccggggaggggaaagtgcggcgctgcgggtgccccgggctgcgggaagcgccgctggcttccctagccccactcactgatggagaaggtgccgggctcttcccggacgactctgcagcgctccagcagcagggctccgacgggctggaggagacacgggcgccgggacggggcagtgagcacccggcctccgaggggcccagcctgggacccgcccgcgcgcccgggacgcccctacctcggcctcgtctgtccgaaagtagaagaggaaattcaccaccagcttcaccagccgccgcttcagcactgcgggcacagcgcgcactcaggggcgcaggcagcccccgcccggaccccggcctcccgtccccggcgccccgacccggactccggcctccggcacccccgcccagaccccggccccggcctcccgcccctggcactgtctcggtctcccgggtcccgctcaccgctgcccttcttggggcccctcatgcccagctcggccgccatctcggccggctgccgggacagagcctgcagctccttctcgttgtaccgcatggctccgcggggaacgggaacccgggccgcgccctcccggccgccgtccccgctcaggctggggccggcgccaaaaatgtctcagggcgcagacacggaagcacccccagggctagtgcgcctgcgcaccttgggccagccatgccgcccgcctccgctgcgtggcgctggcgacccgtggctgctggcgtgggcggggtaccggttggtaggagagacggaccgttgttacataaccattaaactgaaataaaccggaccaaggtggaacagaatcaaggcaccccagcgatggctggcacccctttctagagcggccaggcgcaggcggagggagcgataacgtcgcccggagagtgtcagccgctccctcgcgaaagttggccccgtgcggccgcagcggaccgagggttcgttgagagcgttgtgcgcacgcgcagtttgccttccaggccgcgctttcagcctctccccctccagccttttccttcgcgcctcgggaccctctgactcacgccgctgggcgggccaggcatgcgcacaccagagggcccgtctcatttgccccggaagtgctttctttgcccgccgttcgccaaacgaagtcgtggaggtggcgaaacgaggaggagataacgcggccttgggctctggtgaggagtagaggcggttgagggcggcggccgacgcggaccgggggttccctgggggacagcggacgtaggagagaggcgcttgcgacaggccgcgggccgagggtggggcggcggcgtcgctcccctccctcctcccgtgagcgtccggccttgtgcatcctgaggccccgcgctgggcgggcctggagggtcgggcccgccaggaactctatttccaaactcctgttgggaggccgcgcgcggggcctcacgcctgtaatctcactgctcagggaggccttggcgggaggatcgcttgaggccaggagttcgagaccagcctggacaacacaccgagacccccatctctacaaaaaattttaaaaaattagccaggagtggtggttgtacctgtaggcccagctactcgagaggatcgcttgagctcggaatgtcgaggctgcagtgagccatgatcccaccactgcactccagcctgggcaacatagcgagaccccatcactgcaaaaaaaaaaaaaaaaaaaattagccgggcgtggttggtgacgcgcgcctgtagtcccagctactctggaggctgaagcgggaagatcgcttgagtccaggaggtcgaggctgcagtgagttgtgattgtgccgttgcactccagcctggacaacagagcaagaccctgtttgacaaaataaaaaagaaacaaccaagattcgttggggtcgaatcgggatcgcggctgaaatggtttcggccgccttccttgtagccgagaacgcttctgtatgctcatctatacctgttagttgactggggctctgtgatgtaattcctgtgagcctcagttcccttaaaatgggagtgacggcttcaacatcatgccaaaggcgaccagaacacgttagctggccccattttgcaggtgcaccccgctgtgaccgttgttcttgtgtatccttggacgacaccaaacagccaggcggagctctggaaaataggttgttggctaggttaaggagagaacggtgttgccacgaaaaactaattccttctcaatggtctagtcccaggtcccagaggccacttttcctcaattcttaagctcatttcccctggtcgtcatcggttttttgtttgttttgagacagggtcttgctctgtcacccaggctggagtgagtgcagtggtgcaatcacagcttactccagcctcaaactcccatgctcaagccatcctcctgcctcaacctctcgagtagctgggatcacaggtgctcaccaccatgtccggcgaatttttgtattttttgtagagacgaggtttcgccatgttgcccaggctggtctcgaactcctgaccaggtgatccacctgccacggcctcccaaagtggtaggattacaggcatgagccactgcacccggctaatttttgtattttttgtagagatggggttttaccaggttggccaggctgtcccctgatctttaccttagtaagtaacagatttcttcatggatttatcaatttgtagacatcatctgctgatttcttgtcacggctgttgagatcttctccctcccatccacccactgcaccttcaccttccatatcctgaatgagtttatgtcatgagcatagttggtcattggttgtgttttctaaataagatgcaaaatattgttggctgctaaaacaagtaatatgttcagctaggcttttcttgtaccattctatcttcccttaaagctaattaactttgtttttaccatgagcctgattttcttttacctgctgtttgttttttccccacaaagctcccacctctcacacacctatcagttgtattttgcataggtttaaataaattgatctcccctcaccacttccctccaagacccccttatcctcctcctccaaatgggactggttgtgctctgacctggaagtggagctgttgtcccaaaccttcctgtccttgctcccctgtgctgacctctgtttccagtgtggtcatctctttcccttcatgctgtccgagcaaaacttctgggagcttttgaagaaacagatgatttttttcggggggtgggggaagtccttgattgtctgaaaacgagtttatttaccctcatagttagaagtttggtggggtataaaaatctagattgaaaatctgtatttgtaggccgggcgtggtggctcacgcctgtaatcccagcactttgggaggctgaggcgggcggatgacctgagtttgggagtttgagaccagcctcgccaacctggcgaaatcccatctccactaaaaatataaaaatttgccaggcgttttggcatgtgcctgtaatctcagctactcgggaggctaaggcaggagaatggcttgaacctgggaggtggaggttgcagtgagccaagatcgagctactgcctgggcgacagagcgagaatccgtctcaaaaaaaaaaaaaaaaaaagagagagaaaaaaatctgtatttgctcagaactgtgaaagcattgttttcagtgctgttctcaaaagatcagttcctatgctggtttctgatgttttctgctcagttgtctttctgtctagtagaagcttaacatcttccttggtgtcgtaaaatttcctgatttcctcatttaccggggatctttttatttgctgatcctggtgggtgcttggtatctggacagtttggttcctttagtcctgggttttgtttttgtttttaattttcttgctaatgttcttatgttatttctgtgataatatttttcctgttttattttgttgggtgttttttcagttctcactctggaatgtcctctaggttcttgcttttcctcctgtttttttaacttttgactttcctttatgaaagatttgtttggctcagcttccaactctggtatggaattttttgtttggatcgtcctgtctgtatttttcaagggctttttgttttaattcagcttgtcattcagcttcctgttctgggtttgtggtgcagtggcttcccccgataatgaaggagggtgtcagcgatctcttactgggatacccatcagtctctttgttctcggatgcgtgtgtttctctttaagaacaaagcggccggcagctctgtgtgagcgccacttctcatccagggaggtcaactgcccagtggcctggcaaggagcgggccttttctttgaggtgtggggaccctgaatgtcagtatttgagaactcttcctctggcgctgtttccccggaaaagactcctggcctcccccggggtggggggcgtccgtgctgggccgcctgccacctgagctgtgcggaggaaccgccagacttcccgctgcccaggcggcaggtcgtgattcagtccccccttttcagcctgaccctggacccccttgctctgctgggcctgtctctctaactctagaggcccttttataccagttcttctgggaataaagttctgatctcctcgagggttgtgggcgatccgagcgtgggaccttccccggggtgccgccccatttcagctgctgaggagggacagtgtgggtgttcggtggctgcgatggcttgggttcggatggtttctggttttcggatcagagctttacttggtgagtggttgagtattggtctgggtttaggtttcagtgggccagactccacaggtgctccctgtgacagctggagcttgtgtcctgagccagccactggccgctggggcgttctgtctggccagttttaagaagtaacttggcttgccctagatggatttgaactcttggctttgttagcattttgccatctaagttccttctccaagtcctcccagccatcgtgtcattagaacgttctggaaatgtcactaaaatgtgcccggaaataagtgcatcaagatagattggtggctcttggtgtggccatctgcacctgtcctggccccagaagctgtgctgcctcttccgcatggaggagcaaagcgcaggtcgctcctgaggctgagctccgctcctcctgggccctgggtcctccgcagacacgtcccacccactgctcttctctctgccagaagctgccggccatgaggacgcatgggtgggcgctgtggagagtgcaggcttgggggtagagaccagtgatggctctgcagagcttagcctcagagtaggggcgtggtccaggagaggccacgacagggacaagcagggcgttcgcatgctgttgaattccttcatgacgaaaggagcaggtcgtcctcccgggagaggggagcgcttgatgacgccccgagatctgtgtgtgggagtgcctctcagcaccaggcccctcctgggttcttggagtgcatccgtgaaagaaggccgattccctgccttctcacacgttcccccgagcgagggcttggttcggtgctgagatgcgtggaggactgtggtttctgtgatgtgtggagaggcaagtgcggctgcggcctggtgggaggctgcttgctgggctccccacgcacgtcccctgatgtgagtttcatgtcacttgaccaggaaatgcttgaatgtcctccagagaaaaatgaggcacttcatgaacctgtccgggcggcacccacacaatcctgcccgcctgtgggccgtccggagacagaacctcccaggcagctgtaagctgttgtggcagcagggactgtaggagttggcgtggcctgcagctgacggcgccagcatggagagggtgcagttctccctggtcctgaagaatgtgtggccaagaagcccgaggcggggagggttccttggggccagagggtggcgttcccagcaaaggacagtccttctggtgtcacagtctcctttttcacactggaatgttctttgttttgtgaagggatggcgatggtcacagtggtggtttctcgaagtttacgtgacaacatgtaaaaatgggcatctctaggtgggcttttgtgacatctgaacttctgatggggcagccgtgatactgcagtgagctgggaggtccacctcaccagttaccatgcttgatcattttcataaacttgcccagggaataaaaactggttggggagggctcctgggcccccatagagtaaggggtgacttcaggccccaccacaagtcagcagtacagctggcctgtccctcagcatgcccctgcacacctgcggccactgtggcctgtccctcagcgtgcccctgcacacctgccgccactgtggcctgtccctcagcgtgcccctgcacacctgcggccactgtgccctgtccctcagcgtgcccctgcacacctgcagacactgtgacacatcactgcagacgcagtagttcagatgacacggctgtatcagcttctggttctggggtcagagtccaaacagtccacagggctccattccttctggaggctctgggggacaactcgtttcctgcctttcccagtgtccagaggcacctgtgtgccttgcctcggggccccttcctccccattcacagccacagcgcagcctctctgactctcagcctcccgcctcctctcatgaggtcacccaggatcacctgccattttaagatcctcaagcccacctgcacatcccttttctgccatgaggggacatgttcacaggtcccagggattaggatgtggacatcttttgggggcagtgattcactcagtctcatgggccccatctctctgagctcacccaagacccttaaaccagggcccggggccaacattgagcaggcaagggaaagactaccaggagatgagaggaggctgcctggaactcagatttgcacagagcctgaaagggcgtgggagaccttggcagaggcctgcatcaggaagaggatgttggggactcagcagagccccctgcgccacaagcagatgtggcagatctcccaggtgttactcagtgaggatgcgaagatcagtgtcctcactgatctccgcctaacaaatttacatcgagcccaagagattaggttgggacaagtaagcgtagccaaccagagagggaattcagaggaaggcgtgaacactaggggcttgggcagtccgggatggcttcctggaggtggtgactcgtttgtgagatcttggtcttgtcttccctttatgccttctctgggctccctattacaatttcaggtctccaggccttggcaccctgggctggagcggcttcctctccatccctcatgcctggtcacttggagacaggctccagcttccttgtgtctgtgcctgtccacagtgggcctcagcctcctggaagagactgggtgcgctatggggtggccccctcagggctggttagaccctggcgctgggagtgcagggtgaggggcagtctcgagggctccagcccagcccgcccagggaggtcccagcagcagccccgagttctgagccatcttcctcactctcctcttggcctccacaggtgtctcccagtctgctaaagccctaaggccatcaccatggacttccagcatcgccccgggggcaagaccgggagcgggggcgtggcctcctcctccgagagcaaccgtgaccgcagggagcgcctccggcagctggccctggagaccatcgacatcaacaaggtgggccagccaccgtgcagctgcctgtggtgggtgctgggctttccagggcagccctggagagggtgccagaggctcttcttgggcctccgcccaggctgggcgatgcagccccgtgtccagacgctcccctgttgcccccgagcagccacagctcccatctgtccaccccagagagcagaccctctgtggctctgagtcccatgtggacatgttttgttctgtccacagccttctgttttgcattatttaattttctgggagtggggagagctgatgtcagtccagccagatgtggtgaagggcagcctttgattttagcttgtgcagaggcaggggtgagccgagtcccctcagcaccgtggacatcggggctggagcactctttgtgtaccctgacatgccccacgggcctggcctatggcaagggctctgttaccgtccccgtcttccagatgaggtcatgggtagagggggtgccacagccgcagatggtggagttagactttgaactccagcgtctgagacgagatgtgtgcgcccggctgccccagcttagggcctgcagatgggcgggtctttgggtcttcagtgtagcccatttgcttttcttgtgcctgtgtctgccttgtgcctactgctggcgtggtggcgtgggcagtggacggctccctgcctcgggagtgaccggcggtgctgtcctggctgtgcctccctctgactcagaaccaccaggaaggtggtgtcgggggctccctgggaacccccactgctcgaagcctggcccacagccccaggtggtgacacccgtgctcacgaaggcctcccgctggatcccccgttttcagaaatgcttgaccactgtcagcggtagccatgcctctacagaaggggggttctgcctccatgcctctacagaaaggggatcccgcctctgagggccttgacggcagcaggccgcgatcttctgtctaacgggcccctgttcttcccctccaggacccgtacttcatgaagaaccacctgggctcctatgaatgcaaactctgcctgacacttcacaacaatgaggtgcggcctctgcctggctccgggcggctcgcggcgggctgagtggctgacgtcagggggacctgcctgtgtctgtccgcccggcctcgagtcatgcgtgtttcctttccactccaggggagctacctggcacatacgcaggggaagaagcaccagaccaacctgtgagtacctcatgtccctttgatgcctggtgctccagcagccgttggctcaagtctctgtgagcctcgcgggccactgctccacagccggggagccagcctggcctgagcctccctgggcgcttgagtacggttcctggggagcattagagaacagaggcatggatggctgaggcgggcagatcacttgaggtcaggagttcgagaccagcctggccaacattgtgaaactccatctctactaaaaatacaaaaattaggccaggcatggtggcacacgtctgtaatcacagctactatggaggctgaggcaggagaatcttgaatctgggaggcagagattgcagtgaaccaaggtgctgccactgtactccatcctgggcgacagagtgagactcttgtcttattaaaaaaaaaaaaaaagagcagaggcatggagttgttggaagggccccagccagggacagtgaggagcatgacaggaagagaacatgcctgtcctatccctgtcctcagccaaaccccagggcccctcccaggcccctggccctcctcatctctcagcttgtagtgagctccaaggtcagggggctcctggcacctgggcccatggctttggtgcctgtgtgtggaggggtcccagcagcacctccatcctgtccgcagggcccggcgagcagccaaggaggccaaggaggcccctgcccagcccgcgcctgagaaggtcaaggtggaggtgaagaagtttgtgaagatcggccgcccgggctacaaaggtgagtctgcccgcagcggggccggccacagccgctgccgtgacataagtgtgttctttagtctccagtgcgggaggtgcagccctgatagcctcctccctgagccactgttttccggccttggtggccgtccctcacccacctgcagcctctggcgttgtgtctgggagctgtcaggctgggcccgataagcacccatctcacccagcagcccatttcccagctgagccacagtctgtgccctcctgtccgggtcttgtggaagcttctgggaattcttgccaagcaaaagagtggaagtggaggtgtggtgagccctggcacatccctccggttaaccttgaagcctttgaaggaggacagggagaagcggctgttagaggcagctcctcccggaccctcagcagtgggaatggctagaggtgaccccggttcagaaagctggggaagtgaccagggtggaagatagagacttgtgtccatagggttcaggaaggcgggcacgctacccagcaagtgttctttacagaaggcggggacagcctgtgtgcctggcctccagacagaagcctgcagggcagaggtcccggggcaggtgcaccgggtgggcgagggtggctagagcggcaggctcctggtggggaggccctgacaggtcctgggcttgggctcaggacggtgaggcggcagagggcttgtgagtgtgcgtgtctgaggccgcatggagagtggccgggcggcaggcagcccagcagccattctcggggtccaggctgctgagctctggcgggaagggcatcctctctcgctcaccgtatacatggtgtcagccctgttcaggcggccccgctcgaatcccagagccagggtgccgagggcccctccctacccagtggccccaactcctgctgggtggtatcccagcacccctggtgaagggctctggggattgggacaaaggagcaccatcctcggtccctgcctgagtgactccgcaggtagctcagctctggcgcacctgtgccttcacctataccagaatcccagagcctgggcggagattgtctaatggttgccagagctgcagggcctcccccggggtcccgctctcgttcagtgggtggcattagcctgccccaggttcctcagcttcggagaggacaagcagccgggacctgagagctttctgtgttgcagtgaccaagcagagagactcggagatgggccagcagagcctcctcttccaggtgagatcagggacttgggcgtggggggcggccaaaggcacccaagaggcggctctgccacccggccgtgtccctgcagattgactaccctgagatcgccgagggcatcatgccacgtcaccgcttcatgtctgcgtacgagcagaggatcgagcctccggaccggcgctggcagtacctgctcatggccgccgagccctacgagaccattgccttcaaggtagcgtggctgcggggttccctgggcccccttgagatgtgcaagccagaaggatctgcataggctgggcaggatgcccctcccatcgggcttggggtcccctgggccccccccaagtcggagccagaagggtctgcacaggccgggcagggcacctctcccattgggctctgcaggagggcctgcttgggctccactgggccaatgagaagggaggccggcagggctgagcgccaggcctgtgaggcctttgccaagtgacctcacttcctgggccaggctgctggagggcttcctacagcctgtccccatgcctggacagggcggccatcaggaaacaaataatacaaacggtgactgcccagggagggggccaacagcgtgctagcattgaggccaggtctgtttcactccagaactgaaccctgtgccccacgaaagtcttaccagccttctcctgggctcccagggtagagtccgggctggggaggctagtgcctcgggctccctgcctgatggtcgccctgaggtcacagggaccaggagccctctctgtcccccgccctcccaggtgccgagcagagagatcgacaaggcggagggcaagttctggacacactggaaccgggagaccaagcaggtgagtggctcgccccgagcctggctccttcccacccagccctggcggccctagccctgccctagccccacccgtgcctgctgaacctttctccgtctctctagttcttcctccagttccactttaagatggagaagcccccggctccacccagcctccctgctggcccccctggggtgaagcggcctccacccccgctgatgaacggtctgccccctcggccaccgctgcctgagtctttgccaccgcccccgccaggaggcctgcctctgccacccatgccccccacagggcctgcgccctcagggcccccgggaccaccccagctacccccgccagctccaggggtccaccccccggccccagtggtgcatccccctgcatctggggtccatcccccagctcctggcgtccaccccccagctcctggcgtccatcccccagcccctggggtccacccaccaacctctggggtccaccccccagctcctggagtccaccctccagcccccggggttcacccaccagcccccggagtccacccaccagcccctggggttcacccaccagccccaggggtccatcctcccccatcagcgggggttcacccccaggccccgggggtgcacccagcagcccccgccgttcaccctcaggccccaggggtgcacccaccagccccagggatgcaccctcaggccccgggggtccacccccaacctcccggggtccatccgtcggctcctggggtccaccctcagcctccgggagttcacccctcaaatcctggggtgcaccccccaactcccatgcccccaatgctgaggcccccacttccctccgaaggcccagggaacatacctccccctcccccaaccaactgagaagctgctccctcccccagcaagcccagcgccaggtgctcttgccttttcccactgagagaaggctgctcttttgtactgccccccgctcattaaacagcctcccccagccctgagtgcactgatgtccgcagcgccgccctactgtgtcagtgtgtgtgggagtgccaggcacagcaccatcccccagtttgggccgactggggagggcctggggcccgccaggagacacctgtgggaggcctgagagatggctgtaccttggagatggcctggtggaggacagaccccaccagccagctaggaggggatctggggtcctgttctggggagggaagagcagactccacgatatccttggggtctccagatagcccaccaggggtggggagggtgagcagggacagggcgcccccactgacttgggaccctcctcctccaggcccacacctcagcacccaggacatctgggccccccgcccccagcgctgtctagtttggttgcctggccgtcactcccagcctggttcccactcctgtgtcttctggggatggccctcaaggacggcatgttgacacatcaggcccagctctatcactggggagggagataggctgccagggacagaaagggctctttgagaaggccactctgcctggagtgggggcgccgggcactgtcccccaaggtcgcggcagaggagataggggtctgtcctgcacaaacaccccaccttccactcggctcacttaaggcaggcagcccagcccctggcagcacccacgatgcgggacctgcctctcaccagcctggccctagtgctgtctgccctgggggctctgctggggactgaggccctcagagcagaggagccagctgtgggcaccagtggcctcatcttccgagaagacttggactggcctccaggcagcccacaagagcctctgtgcctggtggcactgggcggggacagcaatggcagcagctcccccctgcgggtggtgggggctctaagcgcctatgagcaggccttcctgggggccgtgcagagggcccgctggggcccccgagacctggccaccttcggggtctgcaacaccggtgacaggcaggctgccttgccctctctacggcggctgggggcctggctgcgggaccctggggggcagcgcctggtggtcctacacctggaggaaggtatgtggggcccagccccaagcttggcaccgccgtcttccttcaggtgggccgggtcctcctagggaagatcaggggctggcagagcccccaccctgggcagggaggctgtggtcttgttcctaggactgggttgcgggtccgtggcctggaaggtgggcaccacactctgtcctgtccccgaagcccagctcttagacttgcccctgcctcggtgccagggagagagctgctgccttctccccacccctgaagacgacgcagggctcggggccagtggaacccttcttcccacagccccagcctgttctcagggccgctggcctaagatactccctgcggggaaggggcttcatcgggcaccccaacccagagaccccagggcggcagccccacccacagcctcagacgcagcccctgcctgcccctgccgtcaccgctccctggctgcaggaaggcagctaagaggggcacccttgtcccccgcttgaggtcccctgcacagtggccagagcggcagggacagatcccaaagattcccggggggtgtggccttcaatggctcaggcgtcccctgctgtcccggctgcagtgacctgggagccaacaccctcgctgaggttccaggagcccccgcctggaggagctggccccccagagctggcgctgctggtgctgtaccctgggcctggccctgaggtcactgtgacgagggctgggctgccgggtgcccaggtaccagggagttgcatggggcagtgcccgggccgtggcggggggcatggatttgttgcagggtctgcagtactgagaacagcgtagaaccagtggcgatgggaggaaggggaccggtagagcggggctgggtaagcctccatccagccgggctgagccctggtctccgcagagcctctgcccctcccgagacacccgctacctggtgttagcggtggaccgccctgcgggggcctggcgcggctccgggctggccttgaccctgcagccccgcggagagggtaggtccgcgtggagagggacggggagccgggtcgactgcccccgggcccccagcccctgagccagccgcgtgcccacccaccgcagactcccggctgagtaccgcccggctgcaggcactgctgttcggcgacgaccaccgctgcttcacacggatgaccccggccctgctcctgctgccgcggtccgagcccgcgccgctgcctgcgcacggccagctggacaccgtgcccttcccgccgcccaggtgcgcgcaggcaccgggacacggggcaggagcgggcgggggcggcgtggcctcgtggccgctctcaactcctccaattgcgggttccaggccatccgcggaactcgaggagtcgccacccagcgcagaccccttcctggagacgctcacgcgcctggtgcgggcgctgcgggtccccccggcccgggcctccgcgccgcgcctggccctggatccggacgcgctggccggcttcccgcagggcctagtcaacctgtcggaccccgcggcgctggagcgcctactcgacggcgaggagccgctgctgctgctgctgaggcccactgcggccaccaccggggatcctgcgcccctgcacgaccccacgtcggcgccgtgggccacggccctggcgcgccgcgtggctgctgaactgcaagcggcggctgccgagctgcgaagcctcccgggtctgcctccggccacagccccgctgctggcgcgcctgctcgcgctctgcccaggtggccccggcggcctcggcgatcccctgcgagcgctgctgctcctgaaggcgctgcagggcctgcgcgtggagtggcgcgggcgggatccgcgcgggccgggtcgggcacagcgcagcgcgggggccaccgccgccgacgggccgtgcgcgctgcgcgagctcagcgtagacctccgcgccgagcgctccgtactcatccccgagacctaccaggccaacaattgccagggcgtgtgcggctggcctcagtccgaccgcaacccgcgctacggcaaccacgtggtgctgctgctgaagatgcaggtccgtggggccgccctggcgcgcccaccctgctgcgtgcccaccgcctacgcgggcaagctgctcatcagcctgtcggaggagcgcatcagcgcgcaccacgtgcccaacatggtggccaccgagtgtggctgccggtgacccctgcgccgcgcggactcctgccccgagggtccggacgcgccccagctcgcgccccttcccatatttattcggaccccaagcatcgccccaataaagaccagcaagcaaccggctggggtgtccgtgcgtgttagggggcccgtgggacctcccttgccgtctctcctcgcgcacggcccgggtccgccctgtagcgctcgctgtctctcccctgcctgaagcgccccaccaccgtctttcaggccccggacttggtgccgggtccaggcgtaaaggagcaggtgactctgcggccgcagcactcgctttatttcgccagagtcgcggggcgtccagaaggggcccctggactccggcgcggggccggctcagtcccgccccttgcctgcgcggagcttctggcgactcccaggccgctgctcctcgtcgggacgcctcggggacacccaggcctgcttcttcctgggctcggcgtccctggagtcccgtgcccacggccggtggcccccttcgcgtgactcccagcgctggggtagggcttcccggggctccctggcggcccgtggcctctcctctttccgcggcctctctttcttaggtctctcctccttccgcggcttctccttccgcggcttcccctctctccgaggcctctccttgggtccccggtctgcgagggtcacacggtcctcccggacggcctctccggtggcctcgccgggctcctcttcgtcgttctctgcagcctcccgactcccgggaatcttgggtctgacctctgcctcggcccggggcgcaggcggcgctgatggaggcgcctgggcctcgaacttaggctgcaagacagagtggggtcctggggtaagcgcccaccttccccccggcccgggctccttctttccttggggatgaaggtcccaatgcccgcggtcagtggaaggaagctcttaccaggggcgacgatggctccctcggggctgagcttggcgggacccagggctcgggcacacgtgcttggagtgctgcctccccagggacggcgtctgcagcgacagggtcgggacccgagtcagctgggccgaggcacggtccacactgtccatccctccctcacccctagagcccccctccctggacagttggagtggggctcccccggtacggctgagactaaggatgcccccgagccgtgggaagggactccgggactccgctgccgcggcgccccttctccgaacctcgctctttcaattggtcattcttccccccgaccacgggctgtaggaggcccctagcaagggaggggtcgcaggagtgcccccggggggcgctcacgagctgagcggtccccagagagggcgcaggggaaaggcggcagaacgctacgaggcaggaggggttgcacaaggttcatccggaagccagaacctactcgcggcgaggggaatgggccccgcaaaaggtccacaccgggtgagaggggcgcgcaaggcccgtcacttaaggggagatgcacaaaccaactttgggggcgtgcaagacccagccctggagaggaggctcccagaccccaccctggcggcacagcgcctttccttggaggaataggcgcacaggtggaccccagcctcgccccacctctggggagcctgcgctcaccgcggcacagctggaaagccgagcccagcagcgccaccagcgaggcgagcaccaggcacttgttgagcgacaggtctccccagggcagctcctcgctcagggccgggggcggcggcggcggctgcaggggcggcgcggtctgcgccttcttgcgcgcggggacgctccgagggcctgcgggggcaagtgcgcgctgcgctgtggtcactggctctgtgccgcccccttccccgggcgcaggggacaagagacaggcctgtgccctgaacccggctctctctgcctgcctgtgcggccccgggcgcaggtgaacccagccccgggtgccccgcagctgcacggggatgcctagagtttctggaaggtaacttcccggagctgagtggcatagctggtattattacgcattagtagaggctccctgcccgttgactcgctgcctgccacacttcgacgccactcaaccaggacaccaccctccaagatccaaggacccagctccggcacctgagcctcacaccagtccgttcccaccccacacctcacccatgcctcctgcaaacccactcgctccggctttcagcctctccttccccgttcctggggtccccctggcggcaggctctttttccatcttcttgggcctggtgtccacactggggccttcagccacctgagagtcctgtggttatcacgagacattccacatgtttccttccagtgccaaacccttcccgtgggctttagacacctgcctcccttggtcggcttgtccccaactccccaggcgtcctgggttaaaggctgagggtcccagctactcacgtggggcacgctgccggagtcggccagcctgggtgtcgctgtgggaacacaggcagagtcaaggttgtggggacccccaggccaatcccaccctctcccctggccctgctgggtgacgtgcgggtgactaaccccatcttatagataagaaagtaggtggaggccagcacagtggttcacacctggaatccagcattttggggagactgaggtgggaggatcacctgagcccaggagtttgagaccagcctgggcaacatagtgagaccccatctctaaaaaaaaaaaaaaaaaaaaattagcgaggcatggtggcctgcacctgtggccccagctacttgggaggctgaggcaggaggatcacttgagcctgggaggtcaaggctgcagtgacttatgatcatgtcactgtactccagcatggaagacagaatgaggctctgtctcaaaaaataataataaaaatatataaaaatataaagaaagcagacaggcttggagacagctttgcccaaagacacccagcatttcagtggcaacgtgggattcgaacctagatctgtgtggcccagcacctgtcttccttgggggctccttacagacccctgaggcagaaatgagggccaggggttgaacatggggagcacactataagccagtccagtgtgggaggctaagaagctctagtctctgaagatgggcctcctggctcaaggggaccatcagggaagggcttcctcccgccagcgccacaagggtacctgaagccctgtcctcctgggtctcggccagcgcagagtggtcctccagggcctggcagctgcccaggccgccatccagctcctcccaggctctggttgtcatggacatggctggagcagcagcaggtcccaggccaggctgggaggggtggggaacaaggtcttgcatttactgagtctctgccacaggcctgggcctgacctggaggttctgcggacaccaactaacaggccccgtcctcccacccctcctcactcggcaaattcatactcatgccaggcatggcccggcgcccactccaggcatctctctgaccccgcatgcctgccctgggacccctccctaccgcccagcctcactggggtccagtatccatcagtacagtagcccaggctgctctggcccagagagggcgggagcccctgcaggacaacacagcaatgagtcccagacgcaccccaaaccgaaactcttggccccagagtcagctcatgttctctgagaccagggactatttttatctggtgcctgaggccagcgggacaggctaacaggtgccccagcccctcccaggcctctgctctcatggggtctccctctgggccaccctgacttgccattctgggcacccacatcctgctgcgtgaccctgtgagtctacaggctcaggccccagcagcagaaccatcctggctctggtcgtgacaggccggggcaggggaggagggtcccggttgtggttgggggtcttctgatcctgacacagagtaccctgccttgtcccactaactctgttcccataggacagatgaggaaaccgaggctagagacagtgccattggctggaggtcgcaaggagcttcaagtcagacccaaagctgtactcttcagggtccccatggcctctggctgctgggattagggtgtccctgtatctaggctgaaaaaccacccagccctggggctccaagacctggaaggggcctattgcgtggcagtgggggaggggcccaagaagcatgggaggctggtgtgtggcccctgggtgtgcatgggggcagctccaggaattggggacccttacagtcctctgcaacaccccttcacaccccgggagcccacacctctgcccgggattcccccagcctcacttccttacccccgagcctcgcttacccgccagccgctttgctgagccttgtggacaggacggaggatggggagggtggccccgtgatggacggcaacaggtggccagagaccgcgggtgggccaatcagcatgcccgctggagtgaggtcacagccggggagtcccccacccttccctgccattgcagcagggcagggcattgctcctactcagcactcgccactgccacccagggagacgtagcgcctgcagctgggactacaggcgcgcaccatcacacccggtaagttttcaattttttttgagacggagtctcgctctgtctcccaggctggagtgcggtggcgcgatctccactcactgcaagctccgcctcccgggttcacgccattcccgtgcctcagcctcccgagtagctgggactacaggcgcccgccaccgcgcccggctaattttttttgtatttttagtagagatggggtttcaccgtgttagccaggatggtctcggtctcctgacctcggaatccgcccaccttggcctcccaaattgctggaattacaggcgtgagccactgcacccggactaatttttgtatttttttttcagtagagacagggtttccctatgttggccaggctgctctcgaactcctgaccgcaagtaatccatgtgatccgctcgccttggccacccaaagtgctgggatcccaggcgggagcccctgcaatgcattcattcctgctgtttaaagccactgtatttggggtcatttgtttctgtggctctggcaggctcatacactcggaactgcctgctcccacaccgtcatgcagagaaacctgacgcctctgctctggagaggacccggggtctctcagcccccaaaggcacattctaaggcctgcaggcagatgtttgagccctacctgcaaagcatggtgactctgggagtcctgagggaagaggggaagtggattttggtggtgaggcctgtgtgttaaaaatcctgagtgaatggccgggcgcggtggctcacgcctgtaatcccagcactgtgggaggctgaggcgggcggatcgcctgaggtcgggagtttgacaccagcctggccaacatggtgaaatcttgtctctattaaaaatacaaaaattagtgaggcgtgatagtggatgcctgtaatcccagctactggggaggctgaggcaggagaattgcttgaacccgggaggtggaggttgcagtgagccgagatcacatcattgcactccagcctgggcgacagagtgagactctgtctcaaataataataataattctgagtgaatagggcctccccaggaactaccaagagacccagaaggccagcccgccttcagcaaagcaagggctggggttccctggtccccactccctccgctttagaaacggctctcggccgggcgcggtggctcacgcctgtaatcccagcactttgggaggccaaggcaggtggatcacaaggtcaggagattgagaccctcctggctaacacggtgaaaccccgtctctactaaaaatacaaaaaattagctgagtgtcgtggcgggcgcctgtagtcccagctactcgggaggctgaggcaggagaatggcgtgaacccgggaggcagagtttgcagtgagccgagatggcaccactgcactccagcctgggcgacagagcgagactctgtctcaaaaagaaaaaaaaaaagaaatggctctcatttttttctgtatgacacaaggcagagacaaacaggaaacaaagagaagctgaaagcaaaaactgtaaagcacctgtcatcttcccgcccccaaacagacactgtttaatagtttgacatgttctttccgctgtttgtaacttgtgattttattattagttccatatttatttttataaagctggcataattagcgaagggctgaacatcttgtttgtaacctagatttattttttcttcctaaaagtttttttgttgttgttgagatggagtctctctctgtcacccaggctggagtgcaatggcgcgatctcggctcactgcaacctctgcctcctgggttcaagcgattctcctgcctcagcctcccgaggacctaggattacaggcatgcaccactgcgcctggctaattttcatatttttagcagagatggggtttcaccatgttaatcaggctggtctcaaactcctgacctcaggcgatctgcccactctggcctcctgaagtgttgggattacaggcgtgagccacagtgcttggcccctcctaaaagtatattacagcttggcagttcctcaaaaagctaaaatagaatgaccataagatgcagaaactctactcctaggtatctacgaaaaggaatccgaagcttggactcagatatttgcacacccaagttcagggcagcacgattctccgcagccacatggtgtaggcagctctagcgttccatcctcagatacacggatcaacacagcgtggcccttccacacggtgaagtacgacacagccgtgaacaggaacgaggctctgactgcggccatggcgtgaatgcactttaaggatgtcacgctcggtgagaggtgccagacacagaaggccatgctgtatgtgatcccatttctatgaaatgtccaggacagggccgggtacagtggctcatgcctgtaatcccagcactttgggaggccaaggtgggtggatcacgaggtcaggagatcgagaccatcctggctaacacggtgaaaccccgtctctactaaaaatacaaaaaatcagccgggcgtggtggcgggcgcctgtagtcccagctacttgggaggctgaggcaggagaatggcgtgaacccgggaggcggagcttgcagtgagctgagatcacgccactgcactccagcccgggcgacagagcgagactccgtctcaaaaaaaaaaaaaaaaaaaaaaagaaatgtccaggacaggccaattcacagagacaggaaggggatttgtgggtgccggggctgggaaggggatggggagtgatggctgatggggatggagcttcatttagggtgacaagaatgttctggaataagacaggggtggtggttgctgagtcatttcacttaggatgatgatctccagctccatccatgttgctgcaaaatatgatttcatttgtttgttttttgagacaggctctcatctccgtcacccaggctggcatgcgttggcgcaatcagggctcactacagcctcagcctcttcagctcaggtggtcatcccacctcagcctcctgagtagctgggaccacaggtgcctgacaccacacgcagctaattttttattttctatttatgagacagagtctcactctgtggcccaggctccagtgcagtggggccatctctgctcattgcaacctctgcctcccaggctcaagcgattctcctgcctcagtctcctgaggagctgggattacaggcatatgccaccatgcccagctaatttttttttttttttgagatggagtttcgctcttgtcacccagactggagtgcagtggcacaatctcggctctctgcaacctctgcctcccgggttcaagtgattctcctgccccagcctcccaagtagctgcgattacaggtgcctgccaccacatccagctaatttttgtatttttagtagtgacagcgttttgccatgtcgaccaggctggtctcaaactcctgacctcaggtgatccacctgcctcggcctcccaaagtgctgagattacaggcgtgagccactgcgcccagctgctaatttttgcatttttagtagagatggtgtttcaccatgttgcccaggctggtctcgaactcctgggctcaagtgatccaccggccctggcctcctgaaatgctgggattacaggtgtgagccaccacgccctgtctctatgcttaactttttgaagagccaccagtctctcttccaaagcgactgaactgttttacctgcccagcagccatacaggagcgttccaacttctccacgtccaactcgtcattttccagtttctttgtttgtgtttttattgccagcctagtgggtgtgaacggcatgatctcattgtggtttcgatttgcatttctctggtcaaaataaatagctttttttttttttaagagaccaggtctccctatgttagcgagggtagtctgaaacccttggcctcaagcaatcctcctgccttggcctcccaaagtgctgggatcacaggcgtgagccaccgcgcccagcctcaacagcattttcaccttcttattctcatagtgtctccctttgcattcctttcctggaaggctcagctttcccagaagcaaagcctggacacggggcctctgtgggactttctttttttatcttttttttttttgagacggagtccagccctgttgcccaggctggagtgcaatggcgcaatctcggctcactacaacctctgcctcctgggtacaagcaattctcctgcctcagcctcccaagtagctgggattacaggtgcgcaccaccatgcccagctaattttttgtatctttagtagagatggggtttcaccatgttggccagggtgatcttgaactcctgacctagtgatccacctgccccggcctcccaaagtgctggggttacaagtgtgagccactgagcccggcctggacttttttttttttttaagactgagtctgcccaggctggagtgcagtggcacaatctcggctcactgcaacctctgcctcccaggttcaagtgattctcctgccccagcctcccaagtagctgggattacaggtgcatgccaccacacccagctaatttgtgtatttttagtactgacagggttttgccatgtcatccaggctggtcttgaattcctgacctcaggtgatcctcctgcctcggcctcccaaagtgctgggattacaggcatgagccaccacacccggcctatttttgctaattttgtgaagaacagtgtcagctgagggcactgactctggatggagacgactcagattctgaccctgactccactgctgcctggctgtgccacagtttcttttcctgtaaaatggaaataaaatggagaccccacctcctggggtccttgtgagcattaagccaagcacggggacaggtgcttggctcctgtacacagcttgagctgtgtactcatattgttatcgctgccatgacaaaggtgcggaagccactgaggctgtgagattccgcaccccgtggaagcccaatggtgacaccccccacagcagggtccttccagcctctggaacacaaaacacctgagtgggaaacccccaggggaccctcagcatgggccactgaggcaggaggttgagaactgtggggagtgctgggcagtggccaacttcctgcctctgccagggcagcacaccagtttcatttgtgtccaccctacttgttctcagggagaggtggctcctttcctggggtgacttctaggctggggcatttaattgctagtgtgagatcttccagggtcttcctctcttggccatagtgacgttcaagatggcaggggaggtgagcagcgccccctagggcctgagaagctcatggagcaagaacaagaaatagacctttcctggtttgcaggtgtgtttacaatttttttgttttgtatttatttatttattttaaaaattttattcatctatttatttttgaatgggggtcttgctatattgcccaggcaggtcttgaactcctggactcaagctatcctcctgactctgcctctctaagagctggcattataggtgtgagccaccatgcctggcccgttttgttttgttttttaaagagatagggctgggcacagtggctcacacctgggaggccgaggcaagtggatcacttgaggctcggagttcaagagcagcctgggcaacgtagcaagaccctgtctgtacaagaaaaagaaaaaaaaagaaaagaaaaacaataaaaaacaattttacgactgggcgtggtggctcacgccagtaatctcagcactttgggaggccgaggcgggtggatcacgaggtcaggagttcaaaaccagcctggccaagatggtgaaaccccatctctactaaaaatacaaaagaaattagccaggcgtggtggcaggtacctgtaatcccagttacttgggaggctgaggcagagaagtgcttgaacccgggaggcagaggttgcagtgagccaagattgcgctactgcactccagcctgggtgactccgtctcaaaaaaaaaaaatttacaaaagtaaaggtcaaactccatgaaaatagagacatggacaatgtggggcaggaaatactgaagagccgcagagaatgaggttcagatgctctgcgcataaagctttcttcctttttctataacaaacctttgtgaatgcattaggccaggcacggtggctcacacatgtaatcccagcactttgggaggctgagccacgaggatcacctgagcccaggagtttgagaccagcctgggcaacatggtgaaaacccatctctacaaaaatacaataaaataaacatgacaaatactgcaaaataaaatcctgaaaattatagcaaggggcaaaaccataagaaatataggctgggcgcggtggctcacccctgtaatcccagaattttgggaggccgaggcgggcggatcacctgaggttgggagttccagaccaccctggacaacatggtgaaaccccatctctactaaaaatacaaaaattagccagccgtgtggtgcacgcctgtaatcccagctactgaggaggctgagacacgataatcccttggacctggcaggtggaggttgcagtaaactgagatggcgcctctgcactccagcctgggggacagagtgaaactccatctcaaaaaaaaaaaaagaggccgggcgcggtggctcacgcctgtaatcccagcactttgggaggccgaggcgggcggatcacgaggtcaggagattgagaccatcctggctaacacagtgtaaccccgtctctactaaaaatacaaaaaattagccgtgcatggtggcgggtgcctgtagtcccagctactcaggaggtggaggcagtagaatggcgtgaacctaggaggcagagcttgcagtgagctgagatcgtgacactgcactccagcctgggcgacagagggagactctgtctgaaagaaaaaaaaaagaaatataagtacggtaaagggaaaaacaacaacttgctcgagataagccctgtttacttgggggcctcgcttttccatgtgtgtttgcccagctcatcctgaggctgcccacacggctgtgggtcctgctttatcacccagcagcagatgcctctgcggctttgtggccaaaccctggccctgcacagcctccttgtggcctgagcttattgcaggctgcacggtgcacattacaaatggtcagttggaggccaggcgcggtggctcacgcctgtaatcccagcactttgggaggccgaggcgggtggatcatggggtcaagagatcgagaccatcttggctaacatggtgaaaccccgtctctactaaaaatacaaaaaattagccgggtgtggtgggggtcacctgtagtcccagctacttgggaggctgaggcaggagaatggtgtgaacccgggaggcggaggttgcagtgagccgagattgtgccactgcactccagcctgggcgacagggcaagactccgtctcaaaaaaaaaaaaaaaaaaagttggttcagcctggcgcggtggctcacgcctgtaatcccagcactttgggagcccgaggcgggcagaccacgagatcaagagatcgagatcatcctggccaacatggtgaaactccgtctctactaaaaatacaaaaattagccaggcgtggtggcctgtgcctgtaatcccagctacttgagaggccgaggcaggagaatcgcttgaacctgggaggtggaggttgcagtgagccgagatcacgccactgcactccagtctgggtgacagagcaagactccgtctcaaaaaaaatggtcggttccccaggaggcggaggttgcagtgagtggccactgcactctagcctgtgcgacatgtcaaaaaaaaaaaaaaaaaaaggccggttcttgtttacttccctttttcttccccacactgtttgctcaaaagagttcaagcgccttctgagtttttcttcaggagacagagccaggcttgaatataatgccaggcaggaacacatggagaaaaggaggcccagattctgccttattttcctgatttttcttttttttttttttttttgagatggagcctctctctgtcacccaggctggagtgcagtgacgcgatctcggctcactgcaagcttcgcctcctgggttcacaccattctcctgcctcagcctcccgagtagctgggactacaggcacccaccaccgcacccggctaatttttgctgtatttttagtagagacggggtttcaccgtgttagccaggatggtctcgatctcctgacctcgtgatccgcctgccttggcctctcaaagtgctgggattacaggcgtgagccaccacgcttggccattttcctgcttgctttcatttttttttgagacagtgtcttgctctgtcccccaggctggagtgcagtggtgtgatcacagctcactgcagccttgacctcctgggctcaagtgatcctcttggttcagcctcccaagtagctgggatcacagatgcccacccaatcccagctaattaaaatttttttaattttttaaaatttctagaagtttttaaaattctcaacaaagtgagaacctagagatagggtcttgctatgttggccaggctggtctgcaactcctgggctcaagcgatcttcttgcttcagcctcccaaagtgctgggattacaggcgtgagccactgtgcgcggccccaatccttctttatttttacctgtttacattttattttatttaactcattattataattcttttagagacaaggtctccctctgtcacccaggctgcagtgcagttgagagaccatagttcactgcagccttgaccttcctggctcaggggatcctcctgcctcagccgctggagtagctggaactacaggtgtgcaccaccatgtccctaatttttaaatttgctgcagagatggggtctggctatgtagccctggctggtcttgaactcctgagctcaagcgatcctcttgcctctgcctcccaaagtgcacaccgggcccacataccctcttttaaatcagagtcagccgggtgcggtggctcacgcctgtaatcccagcactttggaagggtgagatgggtggatcacctgagttcaggagttcgagaccagcctgaccaatatggtgaaatcccgtctctactaaaaataccaaaattaactgggcctggtggcgtgagcctgtaattcccaactacttgggaggccgaggcaggagaatcacttgaacctgggaaggggaggttgcagtgagccgccgagatcatgaccctgaactccagcctggtgacaaagtgagactctgtctcaaaaaccaaacagccaggtgcggtggcacacctgtaatcccagcactttgggaggcacgtagatcatgaagtcaggagtttgagaccgtcctggccaatatggtgaaaccctgtctccactaaacacaaaaattagccgggaatggtggtgcacgcctgtagtcccagcttctcgggaggctgaggcaggagaatcgcttgaaccctgtaggtggaggttgcagtgagccaaggttacgccactgcactccagcctgggctacaggtgagactctgtctcaaaaaaaaaaaaaaaaaatcagtccatcaatcaatcaatcagagtcatactctctgcgtcctctgccagcagccgtatcccctcaaccttgatttcagaagaaaacccaggcatgggccctctatccttgaccaccccacatcctctgctgtccctttcagacagttcaagcctcaccacctccagagaaagatatgcctctttctctccctgctgtccgggaggcccctcaccagtcacagactccccagctcccagcaaagcacctcccaccctggggagtttctggggaacccggccaggtgggccagcagggcgcagttgctgatcctagcgctcatcccacgtggcctggccagtgtgggggtggcccttctagaagcctcacagcattggcaggcggccatcagaggcaggcaggaggaggaagtgagagctgctgcagtcaggatggagggatggggctccctggtcgtggctgttctggaaatcgcaccggtgacctgttcatttcgagcaggctcttgcctctgttcccagaggaggtcctcaacttaggggcgtcattctgcccccaagggacattggatgatgtttgggacatttctggttgtcatgacttggagtgctcctggcatggagtgggtggaggccagggacgctgctcagtaccctgcagtgcccaggacgctgcagtccagcctggcaacagagcgagactccgtctcaaaaaacaaaaaaacaaaaaaaaaagcaatccacaccctgagtggggaaggagagaggagaagcatcccaggagctggggccctcctggttcataccatttgcccaggatgccccaccccagagaacaatccaagcccaatgtccacgggtccgagggaggagaccctgagttaattatttgaaacagagtctgttctctgctcacaccagacaccagaataaactccttttttttgagatggagtctcgctctgtagcccaggctggagtgtagtggtgcaatcttggctcactgcaacctccacctcccgggtgccagttcaagcaattctcctgcctcagccccctgagtagctgggattacaggcacgcgccaccatgcccagctaatttttgtatttttagtagagacggggtttcaccatgttggccagactggtcttgcactcctgacctcgtgatccacccgcctcggcctcccaaagtgctgggattacaggcgtgagccaccgtgcccagcctcaggataaactcctaatggggcaaacggtataaaccaggaggcccccagctcctgggatgcttctcctctctccttccccactcagggtgtggattgctttttttttgttttttttgtgacagagtctcgctctgtcaccaggctggagtgcagcggcgccatctcagctcactgcaacctctgcctcaaggtgtggatttcaacgtgcgcagtctcctgggacctcagcagggcagaggatcatgggatgcagagtctcttgggggggtccgtggaatcccctaactcgggagtctcacccagggtgattctgcccccgccaagggacactgggtgatgtctgcggatacttgtggttgtcacaactgggggtgctcaaggcatggagtgggtggaggccagggacgctgctcagcgccctgcagtgcccagggcggccccaaatgtcaaccgcaggagttaatttctgcctcaacacctgaatagcgaatgctcgtagcagagatgcaacaacagccttctggtgcagtacgaaatctcgaaagacaggcaggcgcggtggctcacgcctgttaatccccaaactttgggaggtcgaggcaggcggatcacctgaggtcaggagttccagaccagccttgccaacatggtgaaaccccatctctactaaaaatacaaaaattagccgggcgtggtggcgggcacctgtaatcccagctcctcaggaggctgaagcaggagaatcgcttgaacctgggaggcggaggttgcagcgagccgagattgcgccactgcactccagcctgggtgacagccaggcccggtcgcaaacaaaacaaaattaaaaccatgaaaggaatcaggatttgccaggagtagcatttttgcttggtaagaacaaaattttgtttatacatgaaataaaaaatattttattaaacctcactgcaaagtggcaactttttgctaaattcataatttagtctacacacaagctatgtacccgtatgtgactgccaagagttatatctttgcttattaaaagcaaagtgcagttcatacctgagattttttttctggatttaaccaggaggggaaatatttttgctaggtaagtccacattttacctcacaggcgaaacagtttaccgaacttgaccaccaaagaaatcgttttttccttgggagatccacattttagttcatacatgagatgtgtttctgaattttaactgccaggagtagtgtttttccttagggtaagtttcagtttccacaggaaaaatctgaatttatctgcaaggagtaaaatttttgcttaagtccaaattgtacacgaaatattttactaaatttgaatatctttaacattggaagttctttttttttaaacactggaagcattttaagaactgcaagaccaaatttaaaaaaataaaaccagtaatatcatcgatgattaccaggtgttactggaaataattctggcgcggttggacaaccccccaagcacccgggggcctacccaggggaggggtcccgctgcgtgaagggaccctagggagggcgacgtggaccacgacagacaaacgggcactcgaagacccccgaaaatcggccccagcgagccgcccccgcccccaaggcacgattgtgggggcggggacggctcggggcgcgcgcagcgcgtacccggcgccacggcagccccgcccccagaaggacgcgcgcaggagggggcgtggcccgaggctcaccaaccaatctccagagagcctcttcctttccctttccctttcaccaatcaggcgctgggaggggcgggcgcgactttttttcccggcggccccgcggctctgcccctcgtgcggtcgcgttcccggcggcgcggggggcgtggcctgggcgcagcatctataaaggcgggcggcggcagaggcgccattttgcgaacggcgagcagcggcggcggcgcggagagacgcagcggaggttttcctggtttcggaccccagcggccggatggtgaaatcctccctgcagcggatcctcaatagccactgcttcgccagagagaaggaaggggataaacccagcgccaccatccacgccagccgcaccatgccgctcctaagcctgcacagccgcggcggcagcagcagtgagaggtaagtgccccgcccccgtccgaagcttccagaagcgccggccgcgcaggcctgcggggggccgtcctcggggcgccagataggtccccggcgcgcgagatccgcccctttgtcaaggccagaatcgcgccggggacgaggtaggcgcagggcgggcctggaggtcccccccggccttagcagtgctctcgggggagtcgggtttggggggcaagggtgcggagttggatttggggggcaccgtccggggcgcctgatttgcgggaggggcatgggtcggaggtcggatttgggcgcaggacggggagtcgggggaggcgtgtgtcttttgcggggttcgcgggatgggactcggcttcggaggaggggagaggcttctggtcgagggttggatttgcggggcgcagactgggaattcggtttggaggaagggtgtgcggtcgggtcggatttgggaggcgcaggatggggcaatctggttgggggcggggtcggccttggggggctggtccgcggacaggcagggcccgcggggctggtgaatctgcacttttcggtcccggccgtcgagcgtgcgctgcgggagcggggagcgctttgcggtggacgagctcccgcgggtccctgttgcctcgatgtggcccctgcacgcgacggacctcgtgggccccgtttttcgcccctgagcgagtcggtctggatggcccgggacgcgccgggcgaggccgcgcacgtagacggcacccagggcttctccgcgggggccgccggggagctgggggtggcgcactccgacagcccggcagcgccctgggaagacccccgccgcttcccgggaagacgcgtcccgcttccgggggcgcgggtgccagctgcggttgtgggggagcccgcggggtctcggtcgagctttcccgactgcgtcccccgaggtgggcgtcgctcagccccggatcgggaggttgggccgcggtgctggcggtgccgcggtttgggggccgtgcaaaatggaggcaactttggggcctgtttaccctgcgcagcaaatggctgctggcgctgccggctgcgcgattgtgaaaatctcccccggggcgcgaggccgcgtctgcctggatgacgcaaccgggagggcccgggcctggagcgggggcgggggggcgggcggccgggagccggagcggggcgcgtcctccatgaggtcaggctaggcccgcccggtcttcgcggggacaagcaagagtcccagattttggccgtagtgcagggtggaaaggggaagccgcgacagaactgaaaaggggaagcgctggctgtcttggtggccggggggtgaggctctgccccggcggggctgcgtgaggggaaggggccccccgccctgggaaggttgggctgtcctgggcggcgccgcccgaggagtcggggctcagtgactgctgcccttgtaggtgcttggggcaggcgttggagctgccttcgggaagcctcgggggtgtgggaccgggtgggcccctgcctgggcggggcggggtcttttggccgaggcaggggtggggatgtgctgaaggccgcccggacgccctggaggggtctccgcccggagcctggcgctgcctcgtgacctgcatcatcttcagttccagggtctccctccactgctgtagtaacccgggtccggggcctcggtggtgctcctgatgcccctcacccacccctgaagatcccaggtgggcgagggaatagtcagagggatcacaatctttcagctaacttattctactccgtgagtatggggccgggcctgctggggctgctctggggccacaggtactttcttgtgcaccttgctgcccgtacctgtgattgaatgtaatcgtgggaaccctgagtttcatcagagccggcgcacagtctcctgcagcccaggcgttgcctgagctcaacacggcctaggcccaagctttagcgctgccgggttcttggagtcctgtggggtgagtcagggttctgaattgggctgcaccccctggacaggatgatcggctgaatgtaacagaggaactaacgtccaacgacaagacgaggattctcaacgtccagtccaggctcacagacgccaaacgcattaactggcgaacagtgctgagtggcggcagcctctacatcgagatcccgggcggcgcgctgcccgaggggagcaaggacaggtgaggggcaaggacaggcagggagtgctcacccaggggagcagggaccaggtgaggggcaaggacaggcggggagtgctcacccaggggagcagggaccaggtgcgggttgctgcccaaggggtgcagggacagatgagggagggcactgccttcaggcagcacatatgggggccaccatcgctttgttggtggggacagggtccccccttttttttttttttgagatggagtcttgcttttgttgcccaggctggagtgcagtggcatgatcttggctcactgcaacctctgccttccgggttcaagcgattctcctgcctcagcctcccgagtagctgggcttacaggcgcccgccaccgatgcccagctaatttttgtgtttttagtagagacgaggtttcgctatgttggccaggctggtcttgaactcctgacctcgtgatccgcccacctcggcctcccaaagtgctgggattacaggcgtgagctaccgctcccggcctggggtccctttttaaaaagtgcactccaaattcgtaccctgggattctaccctccaagggatgccaggcagtgtcagagcttttctgtcatggggcatgcacgtgggtgggtgcagcggtgctgctcaacactgtggtgtcaggacggccccacccagaggacgatctgggccccagggggaccctggagtagagcgggcctcagggtagctgctaaggcccaggaggtaggcaggtgggtcgggccagccgagacgctgacactcgctgcagctttgcagttctcctggagttcgctgaggagcagctgcgagccgaccatgtcttcatttgcttccacaagaaccgcgaggacagaggtaggtgacccgtatcgcctgcagtagggtgcgtgggggtgcctgcgccgccccttcattctcagcccgcaggcacggtctccctgcgggggtggggggtgcgggcggggggttctggtcggcaggggttctgacggcttctcccccgcagccgccttgctccgaaccttcagctttttgggctttgagattgtgagaccggggcatccccttgtccccaagagacccgacgcttgcttcatggcctacacgttcgagagagagtcttcgggagaggaggaggagtagggccgcctcggggctgggcatccggcccctggggccaccccttgtcagccgggtgggtaggaaccgtagactcgctcatctcgcctgggtttgtccgcatgttgtaatcgtgcaaataaacgctcactccgaattagcggtgtatttcttgaagtttaatattgtgtttgtgatactgaagtatttgctttaattctaaataaaaatttatattttacttttttattgctggtttaagatgattcagattatccttgtactttgaggagaagtttcttatttggagtcttttggaaacagtcttagtcttttaacttggaaagatgaggtattaatcccctccattgctctccaaaagccaataaagtgattacacccgatgcacctggctctgtggtggtgacgctggggactggtgggaggagtgcctgggaccacagagggccctgggtggaggggtcgcgggggatttggcacccaggcagctgcgggacccctcccacggaggagaccccctgggctgggaggccgggccctcagcttggcgccagccttgccactgctcgcttgaagccccttcctgcctcgcgtccccttccgccccagcctgggcctgcgcatggggatgtctgtgctcccaactcaacttttgagttcgccgtgttactggccgcccctagggacctgcagcgccgttcggggcagcagcacttccggcggggtcgtggcctggagcgcttccgggtctgcaaccccgccgtctgcccggccgcagcgccacctgccggccgcatccgggagcgccacccggaaaatcagggccaggcctggccgggaaaccggctggaaagaggaggaaaggaggaactcgaaaagattgtagacttggcgagcgggccggggggatattcagccgtctgagcggtggtggggtcggccgggaggacaaacctggacacagatacccccagctcatttgggcagcgcaaatgcagagaaggggcattagagctgaggccatgcaggatgaataggagtatgaagcagagtagagggggctgttttctggtgtaaaaaacaacttgggcaaaggcgtggaggctggaaagtaacctccagggatgaacgacatggggttggagactctgaggagactttggaagagccctgtatgtattctgaggcactggggagccatgggaggtgtttgagctggagagggacctcatatctggggttggaaagatcctcccaggactgccatggggaatggaatggaggggcaactctgagtctccaggaaggaagccacaggcaagggcagtgcagtgtgtcagaggcataaaggaagactccatccccctccagtgagtctcctctgtgcctgtttattacatcatcctgtggtattaagtgagcacctactgtgtgccaagcctggcctttgcccccagggaactcacagccttgtggacagtaacagaggaataaatgctcctgagagtgggcggagaacgcagggtaaggagctagcgatggcccagagtgggcacctttatttgtttagagaaagtgaaactgtagccgggcgcggtggctcacgcctgtaatcccagcactttgggaggccgaggcggacggatcacgaggtcaggagatggagaccatcctggctaacacggagaaaccccgtctctactaaaaatacaaaaaattagccgggcgtggtggcgggcgcctgtagtcccagctactcgggaggctgaggcaggagaatggcgtgaacccgggaggcggagcttgcagtaagccgagatcgtctcaaaaaaaaaaaaaaaaaaaaaagaaaaagaaagtggaactggaacagtatggcagagggaacagcctacacaaatgcttgggggcgcgaaagaagttggtgtgtcacggaggaacagggagggaggcagggtgggcgcagagggattgaggggaggtggcagggaaccgcggggactgttttagggaaggtgagtccagaccccgctgagatgagctgggtgtctaaggtcccagggagccttcccttcccgtgacaccaccaagcaattctccaccagggacaggggcattcacatgcccaaaatcactggccatcttcagcacaagggggtgctccagagccaggaatgcctctggtcccggcattggcctctcatggagacaatgacagaacccacgcggaagagcgccctggctgctggggaaggcagaacacagagagacattgatcagcggggttgtccacacctggaagtggcgtgggggccctggcttcagagagctgctgcccaacacaggaggcgctggccagcccccagccctggaggggcagctgcattcctgggaagcccttgacccacatccccagcacgggaggggaggctctggagtggggcattgctctctctgctgcgctcctggactctgcaggaagagggtgtcttggctatcatggagacgctgacctcagccccagccctgcctcctgggcaggcctggaccaggtgtgttcgccctgggttggggtcagtcccacagcagcgccagggcctggcccatcgaggactcggtggcctcggccaggtattcgcaacacagccagtcctcgaggctgggagcttccccacctgcggcccgctctgctaggcgcaggaccagcagcccgcggcgcacccgcagccagggcccgagcgctcggagccagggaccaagcggtgctccgcggccgcgcagctcaggcccgggcccccagagcagcgcctgcagcgcgccccgcgtccgggacgccgagggccgcaagcgggtcagctgtgctgccaggagctccaggcccgcggccaaaggcgtggtcgagggcgcagcaaggctgagcagcgctcggaggaggctgcccagctgcggcgcgtgggggcccggggatcccgggggtccagggggctgcagacagacgcggccaaagtcagtgaggagcaggcgtgggggccccgtcgtcgcacagccccgaggtgccaccagcagcaagttctccggccgcaactcgactagggccgcgccccacgcctccaggaacttcagggccgcgctcagctgcagcagcagcagggccacagcccacacgaactcctccggcggctgcgtgcaggcctccgccagccactgcgccaccgtgcgctctggaacctcggctgccagcgccactgcgcctctccagggcgccccgggcagtgtgccttcaggcaccaggccacacagcccctgcagattgaagtgtggagacagggaggcctgcagctccaggccccacgggtggggcacgtccgccccgggcttgggcacctgcaaggcagagggggtgtcggggcctggatcactgggccccccacaagcaccgcctgccccagtgctacctgccccgaagcctcccacgcacacccccaaactgcccccactacggctaggggctgcctgcatccctccagcagcaggaggtcagtgttaatttggaagttagtcaccagtaaggactttcaggaaagttaagccagggaagaagatgttcctgggcaatgagttcgaaagcagattcctgggccgggcgcggtggctcacgccttcccagcactttgggaggcagggggatcgctgaggtcaggagttcgagaccagcctggccaacgcagggaacgctcgtctctactaaaaaatgcaaaactagctgggcgtggtggcgcgcctgtcatcccagctacttcggaggctgaggtgagagaatcgcttgagcccgggaggtggaggttgcagtgagccgagaacgcgccactgcactccagcctgggcaacagagtgagactctgtctcaaaaacaaaaaacaaaacaaaaaacacaaaagcagatccccggccagagaggtgtgggaggggttttgacaagagctccaaggccatacccatggccccatactttagaaacatggtttcctgggttaactgcgttgattcacgtgttagttgcaaaataaacaagtctaatatggtctggatctgtgtccccaccaaatctcattccccagtgttggaggtggggtctggtgggaggcgacttggatcttgggggtggtttatcatgaatggctcagcaccatctcccttggcactgtcgttgggataacgagtgagttctcgtgagatctggctgtgtaaaggtgagtagcacctcctccctcccttcctcctgctcccaccgtgtgagatgcctgctcccgcctcgccttccactatgattggaagcttcctgaggcctccccagaagcagaagccaccagaaccatgagccaattaaggcccttttctctataaattacccagtctccagtattcctttttcttttcttttcttttttcttctcttttgtttttcttttttgagacagagtctcactctgtcgcccaggctggagtgcaatagcccaattttcgaatctcagctcactgcaacctccgcctcccaggttcaagtgattctcctgccttagcctccaagtagctgggacttcaggtgcgcaccaccgcgcccggctaatttttgtatttttagtagagatgggggtttcactatgttggccaggctggtctcgaactcctgacctcatgatctgcccgccttggccttccaaagtgctgagattacaggcgtcagccactgtgctgcccagcctttttttttttttttagacggagtctcgctctgtcgcccaggctggagcgcagtggtgcgttctcggctcaccgcaagctctgccccctgggttcatgccattctcctgcttcagcctcccaaatagctgggactacaggtgcccaccaccacgcccggctaattttttgtctttttagtagaaacagggtttcaccgtgttagccaggatggtctgtatctcctgacctcgtgatctgcccgcctcggcctcccaaagtgctgggattacaggtgtgagccactgtgcccggcctttttcttttttttttttttgagacggagtctcactctgttgcccaggctggagtgcaatggcccaatcttggcttactgcaacctctgcctcccgggttcaagcaattctcctgcctcagtctcccaagtagctgggtttacaggcgcccgccaccacacctaatttttgtatttttagtagaggctgggtttcaccatgttggccaggctggtcttgaactcctgacctcagctgatccgcccgccttggcctcccaaagtgctgggatgacaggcgtgagccaccgcgcccggctccagtatttctttacagcagtgtgagaactgactcacagaaaggccaaatgaaacaagccctgggttatgtctaagatggggcactggggacacctcagagagggtggggctgtggggctcaccttggcgaccaggatgtgccaggcgtcctcgtgcgcgcgcaccacgcggtaatacagggcgtccccgctctctgcgcagggtgagctgtctaggaggcggaagctgtggccggggtggcagggcccggggtggccccccatgagccgggcacggagccgggcatagatggtacggaggccctgcagctgccgcgcagccagtgcagtgtgcacagcctccgggctgtgcagatcgcggagggagaggcccagtggggcgtcagccgggccaaaggtcagctctgcagggagacaggctggtcccactgcagcctggctcttgtccacactgtgggaccccagaaagggtctccgaggcggctgtacttggatggagctgggatggagggtcctgcgggtgggcagtgactgggtccgggttaggatcttcttgggcaggggtgggggcaggggctctgggttggtggagagggacccaggggtccggaggcggcaggccttggagggcagcaggtgggcacggatctgacctgcagggagagacagtgggggagggttgaggacaggcggagtgggaacgggacacgtgactccacctctcagcctcggtttccccatctctaacatggaagtaatgaggctgggcgccggtggctcatgcttgtaatcccagcacttaggaaggtggaagccgaggcaggaggatcactggaacctagggtttgagaccagcctgggcaacatagtgagaccctgtctctgcaaaaattttttaaaaatttgccggacgcggccatgcacaatggctcatgcctgtaattccagcactttgggaggccgagatgggtggatcacgaggtcaggagatcgagaccatcctggctaacacggtgaaaccccgtctttactaaaaatacaaaaaattagccgggcttggtggtgggcgcctgtggtcccagctactcgggaggctgaggcaggaaaattgtgtgaacttgagaagtggagcttgcagtgaaccgagattgtgccactgcactccagcctgggcggcagagcttacagaaggggaaactgaggcttataggaggatggatcagtttcagagagtgatgccacccagcactcagcgactcccacttacctccgtggctttgcacaagcgtctgtcttgctttttttcttttttgaagtcttgctctgtcgcccagcctggagtgcagtggcacgatctcggctcactgcaacctccgcctcctaggttcaagcgattctcctacctcagcctcccaagtagctgggactacaggtgcccgcccgccactatgcccagctaatttttgtatttttagtagagatggggtttcaccatgttagccaggctggtttcaaactcctgacctcaggtgatctgcctgactcggcctcccaaagtgctgggattacaggcttgaaccattgcacctggcctttttttttttttttttttttttttttgagatggagtctccctctgtcgcccaggctggagtgcggtggctcagtcttggctcactgcaccctctgcctcacaggttcaagcgattctcctgcctcagcctcccgagtagctggaattacaggcatgcaccaccatgtctggctaatttttgtatttttagcagagacaggttttgccatgttggccaggctggtcttgaactcctggcctcaagtgatcctcctccttggcctcccaaagtgctgggattaaagggtgggattacaggcatgagttaccgtgcccagcctctctctctttttaatggtatatatttttttctatttcatggctcactgcagccttgacctcctgggctcaagggatcctcccacctcagcttcccgagcagctgggactgcaggctcttgacaccatgtccatctcattttttttgttttgtagagatggggggcgggtctcattatattgcccaggccggtcttgaactcctggcctcaagggatccacctgcctcagcctcccaaggtgctgggattacaggcgtgagccaccacgccccgcccaccaacccacaggttatttttcagccctggcctactccgggccttcccggaggtcactcattttaccagctgctgctgttcccagaggccatggtgcccggcaacctcctgccgctccctgcacccacctgccgctccctgcacccccctgccgctccctgcacccccgcagcccagggctccctggggagctgcttaccaaggttgctatacgtgggctgagtcgaccaggtggggttgtcgggctcggggggctctgtggggggctccgggctgctcatgttgctggggaaaggtcaaacggggcgtgtgtggggtgaccgtgtgcacgcacagggcgacatggggaggggtccgtgagtgctggggcctgggagaccgtcgaggcctcctgctccagggcccttggtgagaacaggcgcacccacactccactcccttgtccagttttgaccctgctgtgtgatcccgagtgggtttcctgtcctctctgggcccctgctgtgtgatcccgagtgggtttcctgtcctctctgggcccctgctgtgtgatcccgagtgggtttcctactctctctgggcccctgctgtgtgattctgagtgggtttgctgccctctctggggccctgctgtgtgatcctgagtgggtttgctgccctctctgggcccctgatgtgtgatcccgagtgggtttcctgccctctctggggccctgctgtgtgatcccgagtgggtttcctactctctctgggcccctgctgtgtgattctgagtgggtttcctgccctctctggggccctgctgtgtgatcccgagtgggtttcctactctctctgggcccctgctgtgtgattctgagtgggtttgctgccctctctggggccctgctgtgtgatcctgagtgggtttgctgccctctctgggcccctgatgtgtgatcccgagtgggtttcctgccctctctggggccctgctgtgtgatcccgagtgggtttcctgccctctctggggccctgctgtgtgatcccgagtgggtttcctactctctctgggcccctgctgtgtgattctgagtgggtttcctgccctctctggggccctgctgtgtgatcccgagtgggtttcctgccctctctgggcccacttcctcaatcatgaggcaggtctgtcacccatcaattttccaggcagtgggaaggacccccctctgcacgtttgggatggggacagagtgttcagcctgaggacaggcctttgggggtcagttgcgggggagacagtgtccagggacccagggatccacactcaggcctcatccccgagggctcagccgtgcggttgctgccggcagccaggcctcgacccacccccgcccagatcccaacctcaaaaagtggccgcttctgtccagctccccgctccaggagccccctaccttcaagactggcgtgccctctgggggaggaggggtccgtggggacaaactcccaatggccacagcccctggcctcgcaggaggggtctgacctggcgccggcagctgacaggaaaacgtccggcccactgtcagaccgcagcccggggtggggaggggacatttctgcaacacttccccagcagccgaggccgccgcctcccctgcccgcccgcagaggacaggatgtaaccgggagggaacagcctggacagagaccaggaggtgggatctgaaagtcaatagccccagggctgacagccgggtgggggcagtggaaggccccccacagcctcagaggccaggctggggtgcggggcagtggggagccctgtgagatggggagagaggggcagagctggcccaccgtaggggagcgcacagaacacggtggcggctgtccctggagaaggtgcaagtggggtctgtgggtttcacttccccgggaaccacctcccctcctgcggcagcatctgaggagcccccagcggccccctgccccatcccagggcccccgaatgtggagcgtgggcgaggaccctcccggctctgccgcgcctcgctgtgtgactgcgggcaaatccccaccctctccgtgctccggcgaagaaagaagagtggctcccacatcccgcctgctaacagccacgcctgctggatttttctttgaaaagatggaatcggctcgttttcccccttcccccttcctcactgcctcgatgcatttatttagaaaagacgttttagataaaatcaccataaatggaaaaatcaagaatggaaaaaacccaaggaaaagcagacgcggggtgaaattccagctgaactgcgtgcctgtcaaaactgtctttttctttggagacagggtctcacactgttgcccaggctggagcgcagtggtgcaatcccagctcactgcagcctggaacgagctcctggggcgatcctccctcctcggcctcccaaagtgctaggatcacaggtgtgagccaccctgcccggccccaaagatgtttttgctgcaaggattgagtgtattttatgtgggatccccgatcccgtttcccttagggaaaatgggcccagaaagagtaggggctccatccagggtcacgcagcagctcgaggctgggagcagaggtccacagagccactgctgagtccccctggcctcccccaatcccctgagaaggggcaggaggggaaggagactacatttttcttatgaacttcccttgagtgggtcccatgccacacttttttttctttgaggcagggtctagctccgtcccctaggctggagtgccgtggtgtgatcatagctcactgcagcctccgcctcctgggctcaagtgattctcccacctcagcctcctgagtagctgggaccactggtgtgcaccaccatgcctggttaatttttattttatttatttatttttgagatggagtctcactctgttgtccaggctgcagtgcagtggcgcaatcttggctgactgcaacctccgcctcccgggttcaagcaattctcctgcctcaggctcccaagtagctggtactacaggcgtgcaccaccacacctggctaatttttgtattattattattatttttagtagagttggggtttcaccgtgttggccagcctggtctcgaactcctgacctcaggtgacctgcccgcctcagcctcccaaaatgctgggattacaggcgtgagccactgcgcccgccacagagtttaaaatgatgcaaaggctgggcacatgcctgtaatcccagcactttgagaggctgaggtgggtggatcacttgagcccaggagtttggtaccatcctgggcaacacagtgagaccccatctctacaaaaaataaaacatgagcctggcacagtggcgtgtgcctgtggtcccagctactcagaaggctgaggtgggggcattgcttgagtccaggaggtcgaggctgcagggagctatgatcataacactgaactccagcctgggcaacagagtgagaccctatcacaaaaataaatcaataataaataataaaacaatgcaaaaacagacaaacatgcacctcagtaatcaagataaacatcattttactgaatgtttcacaaaacctaaccggcaaactatgggccgagcctctgtttttgtcaataaagttttattggaacccgggtggaggagcagggtaaggcaaagagaagcagggttaaacaagtgcagatcagatcctgtctttatttaaaatattgataggccaggtgtggtggctcatgcctgtaatcccagccctttgggaggctgaggctggtggatcacctgaggtcaggagtttgagaccagcctggccaacatgctgaaaccccatctctactaaaaatacaaaaaaaaaaaaaaaattattcgggcatggaggtgggtgcctgtgatcccagctactctggaggctgaggcaggagaatcgcttgaacccgggaggcggaggttgcagtgagatgagattgcaccactgcactccagcctgggtgacagagcaagactccgtttaaaaaaaaaaaaaaaaaggctgggcgtagtggctcatgcctgtaatcccagcactttgggaggctgaggcaggcagatcacctgaggtcgggagatcgagaccatcctagccaagatggtgaaaccccgtctctactaaaaacacaaaattagccaggcatggtagcctgcacctgtaatcccagttactcgggaggctgaggcaggagaatcgcttgaacccgggaggcagaggttgcagtgagctgagatcgtgcactccagcctgggtgaaactctgtcttcaaaaaaaaaaaaaatgttggtagcgtggtgtggcctctggatcaggcccctccagatcctacagctgtcctttcatttgagaagcccttattgagccatgggagctggggccacattttctctggatccccagcatcacccagtacggggcagggcagggatgccgtatgctgatggatttttacatgacatcggccttttggagaaaaatgcctgtgttttgtttgtttgagacagggtctcactctgtagccaggctggagttcagtggtgcgatctcggctcactgtaaccttcccctccccggttcaagcgattctcctgcctcagccccctgagtagctgggattacaggtggccgccaccacgcccagcaaatttttgtattttcgaaaagatggggtttcgccatgttggcgaggctggtctcgaactcctgaccacaggtgatccacccgcctcggcctcccaaagtgctgggattacagacgtgagccaccatgcccagcctattgcaggactattagcttccaaattacagacaaacaaaccgaggcacagagaggggcagtgacttgccccaggccacacagcaatggaagccggagacctgagcctccagcttcccttggctccacaagcaaaagctcacatgtgggaattgtgcctctgtcttgtggaggaaaacaggaggaagttcatacgcagggctcaggaatcacctggaaaagatgccggcttgtcgggggatgtgggagagagagagacaccccaaacgcgtgtccctgtccagaagatgggggtgagagatccacgagggtgccggcatgggctggggcaccccgagtgctgtcctagctccgtctgggaggggaagtcaagtcaggcttggtcagaagccacccagacatggggcgtgaggatggcttggtctggtcctggttttaggggtcccctcttaggtttccagccaccaaggagatgggtgttactttagctgggtcttggctgcctgagcagggagggcctctcagctggggtctcccctgccctcccccgagtgcaccccataaatgagtcagggttcatggaaaccttggaggttgcacctggttcatgtcaggcactcagagcattgcacagggaagaggcggctctcctggacggggactctgaggcctacaggacaatagtttcacctgcctttgctgtaggagagaacgggaaatcagtccccacgggagagtcccacagcttagagcccccctcaccctccagctgccttgaaaccaggcatggagagagggccgcctcacagtccctgacaggcctctgttctgcccccgaagggcagggaaataaaggaaccttagtcccaggttcaaatgggggaaccgaggcccagagagtgacactgggctgtggcgagtgggagactgctcttggccgggtcttctgcatcctagttccgtccacttccatcctgaaaaagcacaagcttctccctgtgccttcccgggcgggtggggtttgagacttcatgcccactgtgcctcagtttccccacctgtcaccgctccgtgcctcggtttctccatctgttgccgctctgtgcctcaatttccccatctgtcagtgaggactggggtggggctaaagcactttattagtctcacttccaaagccaagactccctggcttttctcggagccctcagagacaggcagggcagacatgggaccctgtcagcagcacccagactccccgacagaccaattccaggaggcacagtggggacccatgtcttctttcttccccggcctgagtttggggcaggagtttcccaatggcccagctttgcccactcttctcagcccccacctgtccccagctggggtctcagagcggcttccctccaccctctgccccttgctcgacccatctgtaaaatgggttcgttagcaggacccacccagctcacagggctggcctcagcgtgaaaggagggaacacacacagcgcctggaacagcgccgggaacagcatgggcgctgcagaagtgtggcctatcacatgtcactagtggcgtggaattccctcagggttggcttcccctggggaccccagcagcccctcatccctcagccctgccccctgttgctcccatgggagtaagaacaaaatctgaagtttgttattaaatcggttccatttttattggatttgaaccaaatacagcaggatgaggggtgggggtgctgaggggtcttagttcatgttgggatggggtggggggctcagggggctgggaaatcctaatatacggatgctctgtgaaccctaacctggccgagaatgcaccccctcctgtctttgataggctaaaggcacttggatatcaattctggggggcccttggggttgtcatggtaagcagagtcagacaggtgctaagaaaaaaattggttctgcccaattcaggggtggcggttggggttgcacgaacttcagccctcactcatgtcgagccccctgggccatctgtacatcgtggtgctggcctgggccctcccggccacagctcagggagaacgggctgttgtctccttccagctccttctgaaacttttgctcaaagccttcagggctgagccagctttctctctgtttctctctggctgatcgatctcagagcagtcttcagggatccaggatccaagtcaagccatcaagctcatctgcaggcctggcctctgaatacagggtaataggtttgaccctcagacccattttacagatgaggacactgatggtctaggtggtcttcagtcaccagctgagatcacatagccgggcaggagcagagctgcttttgagcccttcccgcaaagtcctggagggtctgtcctaacctcttggttggcagccaagcccctttctggctgaggttttggcccaacagtggttcctgtccctgcccccagcaatgtcctaactgtcctctggaggatgtggaggggaggggcaagaactggctgtgaggaggccaggtcacagatggtccctgtggtcccggtctggtgcctgaatccttctgcaaaacctcagctcctgcttgtttgccccccgtgacaggatgcccaccatctgcagagcaaccgggcggtgacctcagggaagctcttccttgaccagagctgcagtcggcctgtgaccccagctttggtcctggatctgccccacctctgcaggtgcagagacccagcttcctccatcaccttctcccgaggacccgggtccaggcctccctgcagggtgaagcccttgttccggccttgttcttgtcactacactgcaccgcacgtagccgggatccccgggaaccccctgtgctctttggtctcgttccccacctgagccacgggtcagcagggccggccatgatggggccacgctcagggcttgtctgaggccggctcagaggtcatgtgtacctaggggcaaaagtccctccagtagacccatttggaaggacactcagcaccccagaagccatggttctgggccggggcagggtggccacctctcccttgtggggtggccctctcttgcctgctgttctgggaagcacgtggcagcggagggaggcggagggctggggtgatggctccttcttgtggacagccctgctgggctgtggggaggacggaggacagggcgtgtggacccctgactgtgaccaccgtgtgtgctgggtcctcagcaagacctgagcccaggccccgaggtcggctgggagatgctcagctgagcaggcgctggggtgggctctgtgtcccaggtgtgagctgtgtctcagttatgcgttgtgcctgtcccaggtgtgaactgagcatgtccctggtgtgagctgtgctctcacgagagccctgcctgcctctgtggtcagctctggtgcccagggcttggttttagtgtcagctgggtgtgagggtgtgtgtctcgggtgtgagctgtgtgtgtcccagatgtgagttctgtgttctgggtgtgagctgtgtgttccagtgtgagctgagtgtgtcctgggtgtgagctgtatcccgggtgtgagctgtgtgttccactgtgagctgtccttgtatcaggtgtgagctgagtgtgtcctgcgtatgagctgtgtgtcccgggtgtgagctctgtgttccgggtgtgagctgtgtgtcccgggtgtgagctgtgtttcccgggtgtaagctgtgtgtcccgggtgtgagctgtgtgttctgggtgtgagctgtgtgtgtcctgggtgtgagctgtgtgtcccgggtgtgagttgcgcctgtcccgggtgtgagctttgctctcacgagagccctgcctgccccctgcggtcagctctggtgccccgggtctggttttagtgtcggctgggtgtgaggtgtgttgcacctgtgtgattgggttccaggtgtgagtgtgtctctgggtgtgaggtgtaggacggccaggtgtgagcaatgcagactttctgcgcaccctccccttggggctgtggggccctttgtgggacccgggtgtccaccgtctccccgatgcgatctgtgtacaaagggctgggggagcggaagcccagggcttgggggcagcagtcttgtgcctcctgggtgtgaattgcgggccctgaggatcctggggtctctgagcgcccccagccaccccgggttggtagacgggagcccatccccccatccttgcagcccgcacccccaccccccagctcagccaccatagcagggacaggaagacgggttgaaatctttagaaaacgcttgagaaactgcaaaaaagacgcatgctgatgaaaaacagtcctgcggttgggcgtctacaaaaaaaggggaagttctgcctggggagcgccgtgcagccgtccccttcccctccgggaaatgcataggtggacacgcgagcggccggcccgcgggggaggggaggggagggtccgccctggggacccctcagatcatcttcatgttgaacttgcgcgcgcctccctggcccgccgcggcggccggcccatccaccttgcggaaggagtactccaccgagaagttgtttttgtgctgcccgcggccgcggctccacacgaacagcagcacgaagcagaagaggaccacgcccaggaaggtgatgcagcccatggcggtggacaccaggatggtggtgaggtcgagcggcgcgcgcagggccgccagcgtctcgttgtgggcctcgcccggggtccggttggcggccggctcggggcgcacggtcagcgtggcgaagtaggtgtcgttgccgcccgcgttgctggccacgcacgtgtaggtgccgctgtcctgcggccgcgcgtcctggatctccagcgtccccccggggagcacgcgcgcccggcccgcgctggtggccgtcaccggccggtgctggggggtcacccaggccacggtgggcgccggctcgccctcggcgcggcagaggaagcggacgtcttcgcccgcggtggccgtgacgcgctgcagccgccgctcccggatcttgggtttgcggcacacgaagtactcgaacagcacggagtccggcaggtttcgcagcgcgtcgccgcgcacctcggccggggtggcgcaggccggcagccgcccgtcgaagttgagggtcttgcgacgctgcacgatccacagcaggcgacagtcgcaggccagcgggttcccgtccacgcgcagcgtctctagcgtgttcaccgagtggaaggtgctctcctccaacgtggagagcaggttgttggagaggttgagcaggcggatctggcgcaggcccaggaaggcctgcggctccaccacagccagcagggccccggccaggtgcagctcgcgcaggcggaccaggtcccggaacgacccccgcggcaccgtgctgatggggttgtgcgacagattgaggcaggtgaggtgcgcctggtgccgcagcgcggcggccggcacggcggtgatgttggtgtgggtgaccgacagcgaggtcaggttcaggccccgcaggctgcccgccgccacctcctccagcagcggccagttgtcaatctccaggtgcagcagcccgggcagcctgcggaagttctggtcctccagggaggcgatggccaggtggcgcagccgcagggcgcccaggctgcgcagatggcccagcgactccccggacagagccgtgaggttgcagcgctccagggtcagctcctccagggccagcagccccgcgaaggcgcggcgcgagacgaataccaggtcgttgtcgcccacttccagccggcgcaggctgtgcaggtcctggaaagtgtagtccagcaggattaccagcttgttctcgctcaggtccagcagcgtgaggttgtccaggcgcgtgaagaccccgggcgggatgagcttcagctggttgccacggagacgcaggacgcgcaggcgcggcaggttggcgaaggcgccgggctccacgtgcgcgatggcgttctcgctcaggtccagctcctccagcgcgggcagcgcggccaggtcgcccgggttcaggcagcggatgcggttgcggctgagctccagcaggcgggtctcggccgggatgccgtcgggcacggcggtcaggcggcggcgcgtgcaggccaccgcgcgggtctgcacggtgcactcgcagcgggccgggcagcctccagccgggggcggcgccgcgggcagcaggagcaggggcaggctcaggacgcacagccagcaggtcatggtgcggagcgtgggcctagggccgcgccaccatcctcctgcgcacctgcgggcgggcggggagcgggcagcgttagcaccgttagcacccctccgcggcgcctctgccgccagcccgcccctaacccgtcccagcacggcggctcgctcctgtaaacccagcattttgggaggctgagatggaagaattgcttgagttcaagagttcgagaccagcctgcacaacatagcaagactcccatctctacaaaaaaataaaagatgagccgcatgtggtggtgtaggcctgtggtcccagctactcaggaggctgaggcaggaggatggcttgggcccaggaggtggaggctgcagtgagatatgcttgtgccactgcactccagcctgggcaacacggtgagacccctgtctcttaaaaaaaaaaaaattaaaaattagctggttttcaagtaattgtgaaatattgaaaagtttacccaggcatggtggcctgcacctgtggtcccagctactcaggaggctgagccaggaggattgcttgagcccagggggttgaggccacagtgagctgtgatcgtgccactgcactccagcctgggagatagagcaaaaaaccctgtctcaaaaaaaaaaaaaaaaaaaaaaaaaagcagcattgatccaccgtgtggctgcaattccaatctcctgggtttttttgttttgttttgtttgtgtttgtttgtctgtttgagatggaggctcactctgtcatccaggctggagtgcagtggcttgatctcggctcactgaaacctccacctcccgggttcaagcaattctcctgcctcagcctcctgagtagctgggattacaggtgcccgccaccacgtccggctaatttttgtatttttagtagagacggggttttaccatattggccaggttggtctcaaactcctgacctcaggtgatccacctgcctccgcctcccaaagtgctgggattacaggtgtgagccaccgcgcccacccgctcctgggtgtctttgcataagagaatggaacacacagcgcacggaaaacctgggaacattcacagccgcatctgtaacagccaaacagtggaaaaggctggaatgtgccccaaggaatggatgggtcagcaccgtgcagccacccacacacgaacacgactcagccatgaaaaggagtgaggctctgacccaggccacggtggggatgcaccttgaggacgccatgctcagtgagagacgcgacacaaaaggccacactgtatgaccccgtttctttctttctttctttttgagacggagtcttgctctgtcacccaggctggagtgcggtggcacaatctcacctcactgcaagctctgcctcccgggttcacgccattctcctgcctcagcctcccgagtaactggggctacaggtgccagccaccacgcctggctaattttttgtgtttttagtagagacgggatttcaccgtgttagccaggatggtctcgatctcctgacctcgtgatccaccctccttggcctcccaaagtgctgggattacaggagtgagccaccgcgcctggcctttttttttttttggagacagagtctcactctggcccaggctggaatgcagtggtgcgatctcagctcactgcaagctccccctccccagggtttaagtgattctcctgcctcagcctcctgagtagctgggactacaggcacccgccaccatgcccagctaatttttgtagttttagtacagatggggttttgccatgttggccaggctggtcttgaactcctgacctcgggtaatccaccggccttggcctcccaaagtgctgggattacaggtgtgagccaccgcgcccgtccgtgtgatctcatttctatgaaatgtccaggacaggcccatccacagacagggagatgacatttgatctcagaccctgttgtaggtggaactgtgttcccgcaaatgttcaaggccgggcgcggtggctcacgcctgtaaatccagcattttgggaggccgaggtgggtggatcacctgaggtcaggagttcgagaccagcctgggcaacatggggaacccccgtctcaactaaaaatacaaaagttagcctggcgtggtggcgcgcatctatagtcctaactaggggaatctggggtgggaggatcgcttgatcccaggagttgaggcttcagtgagctgtgatcgtgccactgcgctctagccactgggcaacagagtgagactgtctcaagggaaaaaaaaaggtatgttcacgtcctgccctccgtgcctgctgtgcacgggacctcatttggaatcagggtctttacagatgtgctcagggctagatgagactgcagtggattacagtgagccttttccaacgactcctgtccttacaacaagagggagacttggacacacacctagccctatacaggggaaatagagccgtgtgaacacggaggcagaggctagggtgacacagccacaagccggggattgctgagagccccaggaagccgggagaggcaggaaggacgcgccccgggagcttccagagggcccccggccctgcggacaccttgattttggacttccgcctccggagctgggaaggcatatatttcggttgttttaaaccccccggggtttgtggcgccgtgttctggcaggaaacaggccgacccaaaagttgaacagagcccatggttttctggaggaagggtgtgtgggctgggggaacagccacggcagaggccccgaggtgtggcgggagtctggtgaagctaaaggagagagtggaggggggcggggagctgggttaggaggggcctctgggtggggggcagatgacatggagccgtggtggcccagaggaacaggcgccaatgctccgtgggtcctggtagctgtgcctcctgggctgtttccgtctctcctgggagcctgctgcacccttaccagctcttcttggctgcagccaagattctgggggctggggtggcgggtggaggtggggttggagggagcgggaggaagcagccagaactaccaggcggcattgcccagcttcttctgcttggccgcctcccccgccagccggccggctatttttggcatcttggcagctgagcccccctcggcatccccccaggccccgtggcccaaaccaggttgtgcgtctcctcacggttcccactggccttcgatcctcatttgctaaatatctgcgaaggcagctcccgcctccccagtgcctacgcgaatttaatcccagagcgaacagacgcggagccccgggagactgcttcatgtcagagatgaattgtacgtaagtgaggacagggtttgtatcttgcagctgtaattcattaagatgaggtcacgcaggagcagggagagccctaattcaatgactggcatccttataagagggaaatctggacacagagacacaggcaacggccaagtcacaacacaggcagagactggagtgattcatccacaagtcaagtgacaccagggatggccagctaccaccggaagctggaagagtcagaaagggtctccccaaaagcccccaaaggaagctggacctgcttgagcttcgacttccagactccagaactgtgagagcagcagctcctcttgcccggcgcggtggctcacgcctgtcatcccagcacttcgggaggctgaggcgggtggatcacttgaggtcaggagttcgagagcagcctaagcaacatggagaaaccctgtctctactaaaaaatacaaaaactagccgggcgtggtgatgggcgcctgtaatcccagctccttgtgaggctgagggaggagaatcgcttgaacctggcaggcggaggtggcagtgagccgagattgtgccactgcactccagcctgggcgacaagaggggaaactccgtctcaataaatacataaataaataaggtgaaacgccaaactgaattctggatttaggtggacaggacacatatgtacagatgccaaaactgggcattcacatgccacgtggaacagcacagagtgtggtggaaaggaaggtgtcgcaggtgagaatgtggtcccaccgagagaaaagcgaggggcccctggttcccaggaggccttggtcctcctgcccccagcttgggaacataggaaactcgagggagggaggaagggagggagcgagagagggggcatgccccccccaaccccggaatcatccttaatcccaacctgggcatgttacagggaaggcaatccttccctcccagcaagctccctcccagcactgtttttctgggtcattctctcccgagctgctgccctgccgacagcacactcaggggctgtgtcacgggaggggacaagagtgctagggcggtgatggcacttttatctgccccccgaccctgcacctccccccttactgtccgctccacagtgtttacaaaaccactggtgaaaacctgcccacagcccaggtgtggcggctcacacctgtaatcccagcccacaggccgggcgcggtggttcacgcctgtcatcccagaactttgggaggccaaggcggggggatcactggagcccaggaggtccaggatgcagtgagctgagatcgcgccgctgcactctagcttgggcaacagagcgagactctgtcttttggttcttttttttttgagttagggtctcactctgtcgcctgggctggaatgcaatggcatgatctcagctcactgcaacctccacctcctgggttcaggtgattatcctgcctcagcctcccaagtagctggggttacaggtgcccactaccacacccggctaatttttgtatttttagtagagacggggtttcaccatgtgggccaggttggtttcgaactccacttcaaatgatccacccacctcggcctctcaaagtgctgggattacaggtgtgagccaccgtgcccagctgcaagaccctgtttttaaaaaagaagaataggccgggcatggtggctcacacctgtaatcccagcactttgggaggccgaggcgggcagatcacaaggtcaggagatcgagaccatcctggctaacatggtgaaaccccgtctctactaaaaaaacatacaaaaaattagccgggcgtggtggcgggcgcccgtagtcccagctactcgggaggctgaggcaggagaatggcgtgaacccgggaggcggagcttgcagtgagctgagatcacgccactgcactccaacctgggcgacagagcgagactccgtctcaaaaaaaaataaaaaagaagaagaataaagtaaacctacccacagctctcaggcgagaaacatccatctgttggcctgcaagaccctacagcaagcagccctcacccccaccctagactcatccagatactgcaaaagctctttcctctcagtgcagacccctcaccctgctctgctcccccaggacccgggcatgcaccctccctcccccccttttttttttttttttctgagacagagtctcgctctgtcgcccaggctggagtgcagtggcatgatctctgttcactgcaacctccgcctcccaggttcacgccattctcctgcttcagcctcccgaggagctgggactacaggtgcccgccaccacgcccggctaatttttgtatttttagtagagacgggatttcaccacgttggccaggatggtctcgatctcctgacctcgtgatccacctgcctcagcttcccaaagtgctgggattacaggcataagccaccgcacccggcctttttttttttttttttttgaaatggagcttcattctttttgtccaggctggagtgcaatggcacgatctcaacttactgcaacctctgcctcccgagtttaagtgattctcctgtctcagcctaccaagtagctgggattacaggcatacgccaccacgcccagctaatttttgtatttttagtagcgatggggtttcaccatgttagccaggctggtctcaaactcctaacctcaagtgatccacccgcctcggcctcccaaagtgctggaattacagtgtgagccaccgcgcctggcctgtttgttttttgagacaaggtcttgctctgtcgcccagtctggaatggcaggatctcctgggaggcctttgccttccagcttcaagcgattctcctgcctcagcctcctgagtagctgggactacaggcgcccgccaccacatccagcttatttttgtatttttagtagagatggggtttcatcatgttagccaggctggtctcaaactcctgggctcaagtgatctgcctgcctcagcctcctaaagtgctgagattataggtgtgagccactgggcctggtccattttctaaattagaggtttctttttaagttggaatttatttatttatttatttatttagagacaggttcttgctctgttgcccaggttggagtgcagtggtgtgatctcggctcactgcagcctccacctccccagctcaagcgatcctcccacctcagcctctcaagtagctgggattataggcaagtgccagcacacctggttaattttttcatttttttgtagagatagggtctcactctattgcccaggctggtctcgaactcctgggctgaagtgatccacctgccttggcctccgaaggtgccgggaacacaggcatgagccaccgtgctgggccaataattttttttttttttttttttttgacatagagtcttgctctgtcatccaggctggagtgcagtggtgtgatctcagctcactgcaacctctgcctcctgggttcaagagattctgctgtctcagcctcccgagtagctgggattacaagcacgcaccaccaggtctggctaatttttgtatttttagtagagatgggatttcaccatgttggtcaggctggtctcgaactcctgacctcgtgatccgcccacctcggcctctcaaagtgctgggattacaggcgtgagccaccgcacccggcccaagaaattttttttaaagcagttcccatagagcacagataagggcaaaatcaggaagtttcctggagagatgacaggtctggaatcgctaggtcacagtcacactgatccagtggcagaagtgcctgcgggaggcctcaattcggatgcgctgtgtgacctctgttgagaaacctaccctctctggacctcgcctgtcacggtataggtacaagagccctccggggcaccctccaagctctggctctataattactcctgggatgagaggacagctgatccctcgcgcccagcaggggccactcaagctgtgacctagttttacaaccctgactcccccactcgacggcctggccctgtcatttcctctgcagggtgctgccggggaggcaggaggggggatctggcagctggactcaggcttctgacatgtcccctaagggtctggtgttccccaacttgggaggaagaactggttcctggagaggggacatgggagactcgattctgtgtacacggcctgcatctgctcaccatgtgccctgaatgcatccggttgtcctccctggtctcttattttttattttattttattttttttttgagatggagtctcgctctgtcgcccaggctggagtgcagtggtgcgatctcggctcactgcaagctccacctcccatgttcaagcaattctcctgcctcagcctgccgagtagctgggactgcaggcgcccaccactatgcccggctaatttttttgtatttttagtagagacggggtttcactgtgttagccaggatggtctcgatctcctgacctggtgatccgcccgcctctgcctcccaaagtgctgggattacaggcgtgagccactgtgccctgccttttttttttttttttttgagacggagtcttgctgtgacgcccaggctggagtgcagtggtgcgatctcggctcactgcaagcttcgccccctgggttcatgccattctcctgcctcagcctaccaagtagctgggactacaggcgcccgccaccacgcccggctaattttttgtatttttagcagagatggggtttcaccgtgttagccaggatggtcttactctcctgatctcgtgatccaccggcctcggcctcccaaagtgctgggattaccggggtgaaccacatgcctggcctcttttttttttttttttttttttattgagtcggagtctcactctgtcacccaggctgagagtgcaatggcgcgatctctgctcaccgcagccttcgcctcccgggttcaagggagtctcctgcctcagcctcctgagtagctgggattaaaggtgcatgccaccacacctggctcatttttgtagttttagtagagacggggtttcaccttgttggccaggctggtctcgaactcctgacctcaggtgatccacctgcctcagcctcccaaggtgctaggatgacaggtatgagccactgcgcccggccccaggctgattctttaggggcctctgtcccctcccttgtcctcatgctgtggtcctgggggaaggcgacactttcagggctctctatctccatcctcatcggtccctcggaccacccccctcccaggaagctgccacccacctggggcattacctcccatcctcccaggatgggaacaccatctgctcacagatacctcctgatggtgtgtcccagccacctgaactgcagcccagggacccagccccatccctgacctctcccagggcgacccacagaaccccagcgtaaccccggccacgcggagccaaccccagctccacccttcctctcccacaggccagagtcctccctcgctctgggcctcccgccactgccaggcctccgtcccccaccccgaactcccctccttccagccgggctccagttcgcccccaacattcaacgcgctcctcctgttctggcattggtgtccccagctgccaaatggaactggagtagggggaggatcaggccagcccctgcaaaccgcggtctccccaggctctgtgaacactggggcctggtcgttctctggggtggggccgtcctgggcactgcagggtgctgagaagcgtccctggcctccacccactccatgccagggacaccacagatgtccccagactttaccaaatgtcccctgggagcagaatcaccctggttcagaccctctgggttaggggattccacagacccccaagagactctgcatcccacaatcctcagccctgctgaggtcccaggaggctgtgcacgttgaaatccacgccctgagtgggagggagagaggaggtgaatcccaggagctggggacccctggtttacaccgtctgccgggtcaggagttgatcctggtgtctggtgtgagcaggggacagatttagtgtttttttttttaatttaaataattaatgcaggtctctctttcttggccccatggacatcttatgtggatgactctctgtcttgggcactgccgggtgctgagaagcgtccctggcctctacccactccaagccaggagcacccccttcccagtcgtgacaggcacaaatgtccctggacacggcccagagtccccggcggggcagaacctccctgagtgggtccttgctgtagaggacgctggcacacagtgcgcctccagttcatgccccaggaggagccagggtgattcagcctgttttacacggggaggcggagacccagagacggacggcgacgtgctcagggccacacagcagagaggaagcaggtacaagacgcgaccccggggctgggtgcggtggctcacgcgtcatcccagcactttgggaggccgaggagggcggatcacaagttcaagagatggagaccatcctggttaacatggtgaaaccccgtctctactaaaaaatacaaaaaattagccgggcatggtggcgggcacctgtagtcccagctacttgggaggctgaggcaggagaatggcgtgaacccggaaggtggaggttgcagtgagctgagatcgcgccactgcactccagcctgggcgacagagcgagactccatctcaaaaaaaaaaaaaaaaaaaagaggaaaagaaaagaaaatgtaccagttgcccttcgatgaactggaaacacaacagagaacagaggccagaaagtccctgttcttttatttttatttatttatttgtgggtagtttttttttttttttttttttgagacagtctcactctgtcatccaggctggagtgcaatggttcaatctaggctcactgcaacctctgcctcccgggttaaagcgattctcctgcctcagtctcctgagtagctgggattacagacatgcgccactacgcccagctaatttttggatttttagtagagacagggttttgccatgtgcccaggatggtctcgaactcctgacctcaggtgatcagcccgccccagcctcccaaagtgctgggatgacaggccctgagccacaatgcccggccccctgtccttaaggagcttacattctggtgcgggtgacaccgtgaaatcagtgtacgggacatcagctggtaataaacgtcacggaggtcagaacagctgtgtcctcgggtgacgtcacctcctcggctctgcgccccgccgtccacaggcgcgaagccggagctggggttggcgaccgagaaccttcctgcctcccctccccagcaaggggcacgtcccaccaggcccggactgcccgtctgcccctgcagggcccctcgctctggtggcgggctcggtgagctctgctgcccggtctcgggagtctgggggagcgcggcgtcgacccctgtggagggaggactcgtgtttcaaggacagagcctcattaccatgcacgaccagccgcagctgaggccgcagaggcctttggcaggggggccgggccggcggcagggacggcgttggcggtggtggacgggagtgggggtctgtcctgaacaggtgggggtggtccctgtgctggcccccgccatgcgatcgcaccccaggactctcctcctcttcctaagccccagcatgtgcctggtgccgcgcgggtgctggaggcacagcggcttccacgcagacgcccgcagcaccacagcctgtgcacggcgcatccacgccctgttacaaatgttccattcaacgccttctagcacattcacagatcgtccgcccgcacctctagttccagaacattccatcacccccaaaaggaagccccgtccccttcagcagtcactcccagcccctccccagcccggacccccacccatctgcttcctgtctctgcgaattggcccgtctggacatctcgcatcaatgcaatcggactggctgtggcccccagggactggcgtctttcccccagcgtcaaggtgggggcacaaacaggtgagaatcgtgcagcccagctaatgagcagattgtctgaaaaaagcgctgaggagcggagctagcagggagctgtgggggggggggtctgttccgggctgtggctgtgtttgacgggcccagggaagaccctgtctgagctgagacctggatggggagccggggtcagcagggtacagctaagcgaggggcgaggctggccgggggtgtgtctgcgcttgcgggggtgggagccctagctggcaacggcaaaaccacacggggcactgaacccccagggaggtgtccggacttgcatccacaggcaatggggagccatgggaggatatggagcaagagcatggcgagatctgggttgcagttggaaggcgcgtccagctctgcgtggtccgaccccaggtcgccctgcctcacccaaacctggaaagtcttgactctcggctgcacctccatctccagagagcagggcactattatctccctctccacccggttacccacacgcagagctgtggccaatgatggagcatggggaggctgaactggacaccaggtgctgaatcaatggccccttgtccactccagagccaggacaagaactcacgggtcctcacctgaatcggccactgactgccttgggcagagacatcgaagtctctgagcctcagtttcctcttctgcaaaagggaactgcagggttcccagtcacttccctgggctgagcgagtgagaagtcaggcaaggaggttccttccggggaagtctccattgggtgccggctggggtcaggagcccagagtcctaggccctggtttgctcctggccatgtgttcacctcattcattcattcaacaaacattcattcaacaagcattcattcattcattcaacaagcacttaaaaacaatgcctgtgtgccaggcactggttttaagagaaacagcagtgaacaaaacagacaaatccctgctttctgtctatgggcaagaaacagaagaaacaagtaaagccgactgtcacatggcaggccatggtatgggaaaaaataaacagggaaggggggcctggggttggcagaatggggttggcagaatgaaggcctccccacagccagccggttctaatccccggaactgcagataaggccacccttacatggaaaaagggcctctgcagatgggattaagtaagaattgtgagatcaggagatcattccggatcatccagaggcccaacatctcacagggtcctcacgagaggaggcgggagggtgaaagtcagagactggaagaggctgtgctgaggctatgaagggatagggtggggccctgagccaagggatgcgggtgcctctgggcaatgggaaagatgggaaccggattttcacctggaatgcgcagcaggagggcccagccttggccatgtcctgctttttttttttttttttttttttttgagacagagtctcgctctgtcacccaggctggtgcgatcttggctcactgcaacctctgcctcccaggttcaagtgattctcctgtctcagcctcctgagaagctggaactacaggcatgagccaccacgtccggctaattttttgtattttcagtagagatggggtttcaccatgttggccaggctggtctcgaactcctgatctccagtgatctgcctgcctcggccttccaaaatgctcagactacaagcgtgagccaccacacccagcctcatgccctggttttacgccagtgaggcccattttggactctggcctccagaacggtgcaataataaatgtgtgtggttcccagccactgctgtcacagcagccagaactcatcagggtcattgcagtcttgaagagggaggtcgctcgaggcctcccggatctgtgcacctgccttctggggcgtggaaggcaggggacattgacctctccttggggtctgagatctgcaccaaccacggtgcaggcaccggccttgaggaccccctccccaaaactgtcccccacagcaggacctgggcaatggaggcctctcttccctgtacccccagctgtccttagatatggatcctggattaatggtcctggaagctcttagctcaaggagaaggcagagtgtggctgtgagtggccggggtccctccctagaacagaggtggccctaccctcttggtgcctggtggtgtgggcagctccttccctcagctcctggctaagcccccggcccttccaatccgcctcctctattctgagcagggctcttcccctccctcttgcaaggttacctcaaacacatccccctccagtccccgcccagggcaagggatgctgacatctcccttgggaaaggccctcctagaggccggccaaacccagagggggcaggagtgagaagtgtggtagcggtcccctctgtttccaggcccacagtgacctccatctccctccctctgccccccaccacaaccagggcggtgggagtaaggggagtgtgctctggatgccccgtttgagcttctaagacggatatgggaggagggggcccagcccctcacagcacgtggccctccaaggtctgcttttggggacacgctgccagtcccccaggacccctgcatcctctgccctagatccaggccctcccggggcttcatccatgacaattcattaagccctaattagcttccatctgctgttagtccccgtcaacccctcgaggggctgggggcctcccgacccactttccttcccagcctgtacacggggggccgtggactgccctctgcaggcagggcctctggatctggaaccagttttggagcacccactgtctacaccggccacttcacccactagcccagccctgactagggggaataataaagttcgttttggagagaaggagactgagggtcagagtgggccccagctcactgcacaacttagctgcagacagtcagcatttgaacctggatctgacgccagctcctacccacaaaatcccagctccccactagagggtgaagggcgctctttggaggcccgagattgacatgtggtggtgggcggcttgatggggcccacccggggccaactttgctcgcagagttcttcaagaggctctacctggtgacgaggtagtgactcagggggcgccggggaatgacagtgctgtgggaagagacatcaaactgccttctattcccactcagcaaggcaccttcaggtcccggcttaccctgggggtggacggctgaggctgagggaggccaggcagggctgctgccgtaaccatcgtgacctgagcatctgttttatggtggcaccacactgcagccgaggtgggcagcatctcatttaatcccatgtggggtggatctgagagaggggacgtcatttgccggaagtcaccggtgaagaccagacaggcagggcagggaaggctgagttgaaccctcctaagcccccatcccaccgcccggctgcccccttcctgccaccccacatcatcgagatggggacaggagctgggtctacaggggaagcccgtgggttcttcccactcagatcctgtctccgacgatggctgctgcttcggctcagagaacagccagggtaaggccatgccgcggcagcccaccccacaccagcctcctgataaagccagcaccaccctccctgaacctgtttccagcctgcgtcctccacctgaccactcacacctcacaccttctgcatcctctccaggccacttccagggagccctcctgggttgctctggttctcacagctctgttgtccctgaaggctccccccagccaagccccagatcgtccctctgcaaataccactgcacagcagacgcccgctccccacccccgccggagcaagggtgtctgcagcctcgctgcgtccatggtttagccagggaccgcttgctaaaatgcagcttctggggcacatcgcctcagaagttctgactcctcagaactgggggggccgggacaccggcaccgttagcgccccaagcacacgttgagaaacccagttacatggtggtctccagcgtaaggacccggggcttttcttgtgcccggaccaaggcacgaggtgctgctcccctaaacttgttgaatgggactcagggcctcccctggccaggccccagaggcccgggaggtggcggcacccactcagggtgcccaggcccaccatttctggtgctattcagacgcccccagagcagggggactcagccctatgcccccaggtccctccccgccaggccgggccgtcagctccagcgatggagcaggctccggtgtggaccccagataccctttgcgtcttccagctccgcacccccaggctggaccagacccggctcgggggagacagggcaggaaggcgcgggctgcaggctctattcggacgttccccacaccccagacccaaccagtgcccccttcatctcctcctggagaggagcgcatcctcccagcgtccccagtgccccggggagatgcccacccgattccccgctccttggcgccccagaggaggggcggggggccccagggtggggagttcgcccccaaagtttccagggggagcgtcgggggcctggcaaggagcgatgagcccgggaggggtgcgcggggcaatttcccccggctgaggatggggtcgcgggttgggggctttgggcggcagggtcgcagggtgcaggtgaggggtccccaggtctgcgggcgcgccccacgccgggccccggcacggccactcacctgggcggctccgccgcggacacggcgcgggctgcggcgcgggggccgcccggagccgacacgagcagccgccgccgccgccgccgccgccgccgccgcctcccgggctccgccgtgcgcgccgccgccgcgcgcaaccgcccgccggtctcctcggcgcgcctggcgggggcgcgcgggggctgcgctgggccgcgtgcgcggcggctggggccgcaggtgtgagaggccacgtgggcgcaggtgcggggacactgggagcgcgggtgcagaacccctccgtgcgcatcccgggcgcttcgtgtccgaggacctcctgtccccacggcctgggtgagcctgcggagacggccgtgccgtgcaataaacgcaggggcaccccaagtgcagcaggttgttccgtgtggaaccttctggaagctaccatcgcctcctctgccccccgtcccccacccctagtccaggccgccaccatctgcacctggacatctgccacagcccagcccaggcccattccttatgtggccctcagaggaagcccctcagaggaagcttagccactgggctccagaacctgccgtgattccctattgccgtgagggtcccgtctgcaccccacctaccctggaatttctctttctttcgttctttctttctttctttctttctttttttttttgagatggagtcttgctctgttgcccaggctggagtacagcggtgccatcttggctcactgcaacctccgcctcctgggttcaagcgattctcctgcctcagcctcccaagtagctgggattacaggcacccgccaccacgcccggctaatttttgtatttttattagagacggattttcagcatgttggccaggctggtctcaaacccctgacctcgggtgatccacccacctcggcctcccaaagtgctgggatgacaggtgtgagccaccgcccggctgcctgcactgtttggtctgccgcaccacctccttccccctggcctgtcctcactcactctttcccgggctccaccccctcagccttcctcaaacaggccaagtccctccagtcccaggcctttgatcttcgctgtgcccagcttggacagcctttctctctgtccctccatcgagcagcttggagcctctcagtttgtctaatgggcttgttccccaatgtgccttccgcctagcacacagcagcgcacacaccaagtgcactgcgagtgctcatggaaagttttttacctttttttttgtcttttttttttttttttttttttgaaatggagttttgctctcgtcacccattctggagtgcagtggtgcaatcttggctcactgcaacttccacctcccgggttcaggcgattctcctgtctcagtctcccaagtagctgggattacaggcgcccatgaccatgcctggctaatttttgtatttttaggggagatagagtttcaccatgttggccaggctggtctcgaactcctgacctcaggtgatccacccgcctcggcctcccaaagtgctgggatgacagacgtgagctactatgcccggcccctcactgcatcttctaaaagccacatttagcctccctgtctcacagatgagcaaaccaaggctgggagatgccatttgtcccaagtgaggggtgagaaggaggcctcgggaacctgtgtgtgtaaccttgccctgtctgcccccttcacccactctgcagtcctccccaccagctgtgtattcccagtggctttggcggtggcctggcactcacgcagccacctgtgactcaagcaggctctgttcccagactgtcgcgttggctggaggcccagaaaccgcatccctgggaggctgcaggccaggccccccacaggatgctgtggggggcgggtatggttcaattcctggccccagagaggtccagaaggacttcatgacaccccatgctctccccaccaaatggccctgggctgctgtgctgtgtgaccccagtaggggaggtctccttctctctctgaacgtgtttctttctctgtaaagtgatgctcctgatagctggctctcagggctcttggaggaaggtgttcattgagcacctactgtataccaggccaagggctggagggaggaggaggagacgcttccagcctcaagggggatttcttcggacagagggagcagatgcctgaaatatgaaatcgtcacaaagcggcgtggaagaggcagtagtgacaccgggtcccggaccgaagccaggggccagggaggcttcccggaggaggagacacttgctatgagtcctggagggtgagggatgccagctggggtccagtcgaggccctgcctgtgtaaccgtgggggatgtccctctagcctcggtctccacctctgcaaaatggagatcggaacagttcccatcttctcccggggctgcagagactctgcagtggttctgcccggtttgtggccagtgctcccgagcccttgggggtggagattgggccaggctcctactgcagggcctgagcacgggctgctccctctgcctagaacgcccttcccccagacctctgcccgcccctttccccctcttcactcgcgtctccaccccgaccttccatctctccctgcgtggcacatgcctgctaagatgtccagtaatttgctgatgggtccagtgcaagctctaccctctcttcttttttttttttttttttgagatggagtctcaccctgtcggttgcccaggctggagtgcagtggcgcgatctcggctcactgcaagccccaccgcccgggttcacgccattctcctgactcagcctcccgagtagctgggaccacaggcacccgccaccaggcccggctaatttttttttgtatttttagtagagacagggtttcaccatgttagccaggatggtgtcaatctcctgacctcatgatcggcccgcctcagcctcccaaagtgctgggattacaggcgtgagccaccgagcccggccccagccttttttaagacagggtttcgctctgtcacccaggctggagtgcagtggcgcagtcatagctcactgcagccttgaaccccctgggctcaagtgatcctcctaccccagcctcccgagaagctgggactgcaagtgagtggcaacacacctggctaatttttttattttttgtagagatggggtctcactaagttgcccaggctggtcttgaactcctggcctaatgtgatcttctcttcttggcctccccaagtgctagtattacgggtgtgagccactgtgcccagcccagtcttgtaatattatgtgtccatttactcctccccaaaatgatgagggattagtttttattattattttttaagagacagggtctcattctgtcacccaggctggagtgcagtggtgtgatcatggctcactgcagcctggaactcctgggctgaagtggtcctcctgcctcagcctcccaagtagctgggactacaggcatgtgccaccacacctggcttttttaaattagctttttttatatcttgtgagacagagtttcactctgtttgcccaggctggagtgcagcggtgcaaatcttggctcactgcaacctccacctcctgggttcaagcaattctcctgcctcagcctcccgagtagctgagactacaggcgcatgccaccaggctcattaaatttttgtatttttagtagagatggggtttctccatgttggccaggctggactagaactcctgacctcaagtgatccgctcacctcggccccccaatgtgctgggattacaggcatgagccactgagcctgggtcagattaactttttttttttttttttttttttgagacggagtctcactctatcgcccaggctggagtgcagtggcgcgatctcagctcactgcaagctccgcctcccgggttcacgccattctcctgcctcagccttccaagtagctgggaccacaggcgcctgccaccacgcccagctaatttttttgtatttttagtagagacggggtttcgccatgttagccaggatggtctcaatctcctgacctcgtgatctgcccgccttggcttcccaaagtgctgggatcaccggcgtgagccacggtgcccggcccccagattaacttttaattaacagggtcttgctattttgcccaggctggagtgcagtggtgcaatcatagctcactgcagtcctgaactggcctcaagtgatcctcccatctcagcctcccaaagtgctgggattacatgtgtgagccactgtgcctggcctggattcattattattcccactttacagatgagaatttggggactcagagaggttaggtcactagcctcaggtcacacagcatctgcctgctgaagctggggcttgacctcaggcatctggagcccaaggcttccaggactctacacgtttgcctcttagcagccaaggactctttccccagttacagagggtggccacttgtctggggccacacgggaggctcccaggccacctgcccccgcagcctccctccctgggacatgactgccactcccgcccgcatctggtcccgtccctcacgctggagagagcgagcgagaggaggagggcttttaattttagaaatggttcctgctgcagaagagttcctgctggttttcccaggcaggagagcacaggacaggagacccctcggccccaccacggccgtccccagaaggatgcccccctctgcgggctgctgcctccctgccccccagcctctcccacggcttccccatctggagccgccctctccgcccaggtggtaagtctccatggcaacgtcccatcacaggtggtcgtaaccttagcaaccaggtgctcccaccccaccgcctgggaggctcaaagccgcgcctgcatccccctcccacgctctccctgcccccgccccccgggcagctctccaagaggaaccgagggagatgcatcctgccagggatgctgggcccagagacttgagggacaccccaagatcacccagcagctgagctgctgggcctggggtgctccacgggacatcaaacccacctccctcgtcctgcaggatgcaaaagaaactgcacttctcgacatcgcctgggctcctactaggtgctgcgtccatgccaggctcaggcgccgtccctgccctcaggaggcttccactcaggacaaggggtggggagacactgaccgaggacaggaaggggacaatggccgggcgtagtggctcgtgcctggaatcccagcactttgggagggagaggcaggaggatcgcttgagctcaggagtctgggcaacatagcgagaccctcatctctttaaaaaaaaaattatctggacatggtgttgcatgcctgtagccccagctactcaggaggctgaggtgggaggatcgcttgaggctaggaggaggagattgcagtgagccaggatctcaccactgcattccattctgggcgactgagcaagaccctgtctcaaaaaatatatatgcatattggccaagtgcgctggctcacaccagtaatcccagcactttgggaggccaaggcaggtggatcggttgacgtcaagagtttgagaccagcttggccaacacgatgaaaatacaaaaattagctgtccccacaaataagtgacccccagagtaagttctaggtttagaatgaaatttatccatctactattaaaaaaaaattctctcagccaggcgcagtggccgagaaaaaaaaaaaacacaactctcctctgatttacatggaaattaatcacccacatcagattctgaaggaaactcttgcttatattacttttttttttttttgaggcagagtctcactctgtcgcccaggctggagtgcagtggcgcgatctcggctcattgcaacccccgcctcctgggttcaagcaattctcctgcctcagcctcctgagtagctaggattacaggtgtgcaccaacacgcccagctaatttttgtatttttagtagagacggggtttcaccatgttggccaggatggtatcgaactcctgacgtcgtgatctaccctcctcagccttccaaagtgctgagattacaggcgtgagccacagcgcctggcttaaccttttattatggaaaattttatacacaaacaaaggcttagagaatcacgtaatgaacccccataaagccatccccaaagtgtgatgcatctggttccataagtccctctccaccctccccaacagactatatcaaagcaaatcccagacacgaagtaatttcatccataaatatttgcatttctaaaatacaatgacttaaaaaacacagccaacaattccattatcattttttaagaaaatggacagtaattccttaatatgctcaaatatccaggcagtgtccagtttccctgactgccttctaaaattttttcacactttgttcagctcagaatccaaataaggtccatttactgcaattggttgatatgcctgtctctttctctctctctctctctctctctcttttttttttccagagacagggtctcgctttgtcacccaggctggaatgcagtggtgcagtcatagctcactgtagccttcaactcccaggctcaggtgacccccacccccgtctcagcctcctgagtagccaggaccacaggtgcatgccagcatgcccattaattttttctttttttggtagaaacagggtcttgccatgttgccccggctggttttgaactcctgggtttaagtgatcctcctgcctcagcttcccaaagtgctgggattacaggcatgagctgctgaaccactgtgcctggccttagttcttcctttctgctgtttgtcttatatgtcattttcctgtcttattgcaccgtgtggcacctccagtacaatgttgaaaagaaccagtggaactggacatctttcttttgtttctggccttagggggagagcacccagtccttcgccattgaggatgacagctgtagggtttttatagacatcttttatctggttgaggatatgccattctattcctagttgcgtgtttttaatctgcatgaatgctgaattttgtccaagtgagtgctgaattttctgcatctactgagatgatcatatggttttcctctcttatgctaatgtggttaatcacattgattcttgggtattaaaccaaccttgcattcctgggataaaccccacttggtggtcatgatggagaatcccttttatagacagctggattcaatttgttaatattaaggatttgtgcatcgatattcatgagggatattggcctttgattttcagtaatgtgttttggttacgctggcctcataaaacacattgggaagtgttccttcctcctctagtttctgaaagagtttgggtaggattggtgctgtttgttccttaaaagcttcaggatcaattctgttgttttccagagaagggggtctctctatgttgcccaggctggccttgaactcttgggctcaagccatcctcctgcctcggcctcccaaagcactgggatttcaggcgtgagccaccgtgcctggcctgggaacaattctgaaggtagaattgtcagcatttgctgatggctgggatgtgggaggcaagagaaacagcagggaagggcacccgagggtgtaagcctgaatcatggagctgtttccttggatgcagaaagctggagcggcacctggtggaaggagcattggtttggggtgtgcattaattttggggcgcctctggtgctggggcagagatgaggtcagggaaatggaagtcagaagcattttcaacaatgaaagcggaacccacgggcatctctgtctctgacttcgtgcccattacccccagcttcctgttcccttactgcttctggtctgtgttcactggccggcgtgcagaactctgtcttctgtcgggcactggaaccctagcggcctcgggcccgtcattcctgggtgaatcctgacccctgctggctctggtcagcacggtcgaggccagcgtggccacgcagtggcggtggggggcgggggtccacggagctgagtcctgaagggaggtagagagtgtgagacactggaggcagaagggcccggagttcatagacagacctaggcctgcccggaaagcccctgtctaatgggcaaggcggaggagcccggacttattcctgtggacaatgggggctttggggaggcgcagagtgggagggacctggtgagatcccaggagcttgagccctagccgtggagctgggacccccaggactgtcctttttattttaagacagggtctcgctctgtcacccaagctgcagtgaggtggcggaatcatagatcactgcagccttggcctcctaggctcaagagatcctcccacctcctcctccctaagtgctgggattacaagtgtgagccacagtgcctggccccaggggtgtgctaacctctctcaccctgggcggtccccaggctcaaaccaacaattcctgaaccctaggagctctcctcgtgggcacagcttcttctgtttacaaaccttcttcccttcatatccatgtccttgtctgggtccaggcaggaaatcgacacccagaaacaggcggtgatgggcagcaggggcctctgtggcagaaggtctcacgctacacggtactgtccgggtccttgcacgggtgttctggaggtgcagggaggcctcccctcggtcgttcaaggcaggaatggatctgcggcgtgaggccgacggtgacttgctttctcccagctcctggggccacagtgcgttcattcccctcccctcccctccactcccctcccctcccttcccctctcctccactctcctttcctctcctttcctttccttctttttttgagatggagtctcactctgtcacccaggctggagtgcaatggcgtgatctcagctccttgcaacctccatctcctgggttcaagggattcttccgcctcagcctcctgagtagctgggattacaggcacccgctgccacgcccagctaatttttgtacttttagtagagatggggtttcgctatgttggccaggctgctctccaactccttacctcaagtgatccgcccgcctcggcctcccaaagtgttgggattacaggcgtgagccaccgcacccggtctcattcccttttctctttgcctcttttaggcactgggacttcatttctatgcccacaagatgcgggtggctgggagccccattggcttggggcagaggaaaggcacggtggggtagatggagcggcaggcagcctacctcctacgctaggattctggctgtgttaccctgtgcaagctgcttaacctctctgggcctcagctgcctcatctgtgaacgggaatgacaaaaggacccgcctgaggtcctcctttgggggagggttccgtgaaccagagctaccttggagaaggcagtggggtcagtgtctggggcagacgccccagactgactatcagtaacatccagctcccgtcctccttcggaacctgcagtggggtggtaccctgaggatctctggctggtctgggggcaagaagggcccatctgtcttatctaccagggcctccgccaatgtctcccagagtggggcctccgaggacaagactcgagggctctcggccagcacttgaccgcgggcacaggcagcaaagctggttcccgggccaacggccacggccccgacatcgtgatccgagggctgcgctgaccatgggcagggagttgaaagggtgaggtctgggccaggggcagggggcagcctgcagttggcacggcgggctggctggcgggacctgctggggctggggctttatacggggccaggagagtggaggcctgggggatccagtgtctcgggccgggccggccgccgtgtcctcatttctctctcggttccctctctacgtctccgcctctgtttctgcctctccctatctctctccaaatctctctgtgccttctggctgtaactgggtttttcttctctgactctttgtaaaatattaaattttcaatgtaatgtggaatgtaaaatattaaatttctccttttaaaatattaaaagcaggccaggtgcagtggtgcgcacctgtcatcccagcactttgggaagccaaggtgggaggatttcttgagcccaggaggtcaaggctgcagtgagctgtgctcacaccacagcactctggcctgggccacagagtgagaccttgtctcttaaaaataaatacatagataaaattaaaagtggctttgtagttggctggaggtcctggactcctccagcgtatcctctagtgatgggcagctgggttacttccagtcttttccgagcaggtcagagtggctctctggggtggaaatggttgagaggaacaggctcattctggtctattctctggggacttctgtctgcctccccaggaagttgacctctccctctcccggtctgcacagccttctgtttttgtctgtgggcctcatttcaaagcttcgtgccctgggctgggcatggtggctcatgcctgtaatcccagcactttgggaggctgaggcaggaggatcacctgaggtcaggagctcgagatcagcctggccaacatggtgaaaccccatttctactaaaaatacatagccaggcatggtggcgggcacctgtaatcccagctacttaggaggctgaggtgagagaatcacttgaacccaggaggcggaggttgcagtgagctgagatcgtgccactacactccagcctgggcaataaagtcagactccattgcaaaaaaaaaaaaaaaaaaaaaaaaagcttcgtgctctgaactctgtccccacatgactgtggccgagggcccagccacagagtggatactcaacacctttttcaacacttcagagagaaggaattggatttcagagaggttgggacaccttccctaagccacacagcatgtggtggggggagccttgggctcagggctttgtggctgcagagggctttgcaaagttcatcagctcactaggaggtgacggagtgggcagagagcagtctacagtgtggggggctgttctgaggggtgcagcggtgaggcaggccttgcttcctctgcgggagaaaccgtggggctggaaaacgggacttccttcctctcctgcctccctgccgttcctggaggttctaacgaggccagttagcctctaaggccttgacacgttctcccactgggggttgaggcctctgggccactgggaccctgggtttcagcctttgcatctggctcagacagggcaggcaggtgtgccgcgtggacagcgtgttggtttccaggccggtcagctctggtgtcagggttgtgtttctccatcacgtgacatcctgatcccccacctgtcaaatggacgcagggaactggtcccggacagcgaggcttgtaggcttgtgggttgaacgtcagcagtccgggcacacctgaactctgtctgtccttcgctggaggctgtgaccccgcagctatcccagcaaacccccgccatccccggtgcgaggctggaggctggggcttgggatgaggtctcggccggtggtggcagggctgggctaggtggccggggccggggagggatgaacagcggatgcaggggttggccacgaggtccgataactaattccccagccacaggggctagtgccgctgggccccagcaaagccagtgtctatggggcccagatacccctgccgagaagccagctggttccacttattcggaggcagccagggagcgtgagcccatccagacccgaggctgagctccgtcctgttctgctgctatagcttcctggcaacctggaccacacgctgcctcggtttcccgagctggggatgaaggggttagcggccaggatgaccctctcacgctcaggtcataagggacagcctatcctctctcaacccgagtgatgaatcagacaggccctgccctcctctgggaagacagtgcctgggggacagaggtgcaaccaggaaacggagtccaggaggattgcccggctgtcgggaagagacatttaggggtatgcaggatgggctggcccgctggagtgtgggaagtcctagtgcaggtgtgggaggccggtgccagggcctgtatctgcccagtcaggacacgtttttaacattttttgtaggccaggtgtggtggctcatgcctgtaatcccagcaattggggagggtgaggagggtgatcactcgaggtcaggagttcaaaaccagcctggccaacatggtgaaaccccatctctactaaaaatacaaaaattaggccgggcgcggtggctcacgcctgtaatcccagcacatggggaggttgaggcgggtggattaccttaggtcaggagttcgaaaccagcctggccaacatggcaaaacctcatctctactaatacagaaattagctgggcatggtggcgggtgcctgtaatcccagctacttgggaggctgaggcaggagaatcacttgaaccaggaaggcggagtttgcagtgagccgagatcacgccactgcactccagtctgagtgagagtgaggactgtctcaaaggaaaaaatatatatattttttgtagagacgaggtctccctattttcccaggctggtcttgaactccggggctcaaagagatcctcctacttcaccctcccaaagtgctgggattccaggcgagagccactgcacccgacctcaggacatgctgtgagcacggaaggaacccagaaggggctggctgtaggtgaccagtccatctcacaagcgggggcagcagcgggggcaggtgttagctgcatgggctgtggggtctggcctcttgatgcaccccggctcctgatgcaccccagcctcctgatgcaccccggctcctgattcaccccaggtcctgacacacccagctcctgacacacccagcctcctaatgcaccccagcctcctaatgcaccccggctcctgacgcaccccggcctcctgatgcaccccggcctcctgatataccccagcctcctgatgcatcccggctcctgatgcaccccagctcctgctgtcttgggggcgggcctggggttccacaagcccctcatcagactgaggttccaaactcgcctgtctcggccttggctgtgcccgccttggtcactcctgaaccctcacccccaggagggaccatggctggtatttgatgagctccagggactgagtccaatctccaggaatccaggtttcctcagaaggtcaagggaaaagcaagattcggggctcagacacattgaggtttgcaattttattaagaaaacaaaaattcaacctatacaaaaaggaaaatgcttccgttccaggaggcggtactgcggtgggagcagcagccaagtccgcgggaaaccgagctgctcgggcctgccctgcaccccccgcgcccccggccaggctaggcgtcctgctgctggatgaaggggttggggatggcctccatgccgtcctgcgggcagattagcaccacggacgtgccccggcacaccacgaggcccagctgccgggtgtcctccgtgagcttgtactggtcgtcagggtctggggaggagcagatagagaggactgagggacctccaggaagcctccgagaccccccacccacccaagaccctcgctccgacctccccacctgcaccctgcaggcgccacgagcacgcagggacctcagacgggatgcgctctgtggggcaggtccccggctcccacggctgagacccatggcccctagagaccagtggcagctccacagacagcagccacagccctccctcactccacaaaccatgggaacaagaaggcccaggtgatagccggctaccccgcgtctcagagctcactggggcccaggcaccagggccgggaaccaggttatcagatggccggccagaatacaggcaccctgggcctcctggtctctgcaaggtccctggagccctagggggccaatattcaccctataacaaagaggctgggggccgggcgcggtggctcacgcctgtaatcccagcactttgggaggccaaggcaggcggatcacgaggtcaggagatcgagaccatcctggctaacttggtgaaaccccgtctctactaaaaaatacaaaaaaattagccgggcgtggtggcaggcacttggagtcccagctactcgggaggctgaggcaggagaatggtgtgaacccaggaggcggagcttgcagtgagccgagatcgcgccactgcactccagcctgggtgacagagcgagattccatctcaaaaaataaaaaaataaagaggctgttcatgtggggtggggaccatgtgggctggcaccccagggaagtgccagcaagcccaagacaagctctcaagaggctgaaggcgattaaaactcctcactactgtggtcctgcagtggtgggggcatgggagaaccatggggcccaggtttttaaactttttttcagacaccaggtcttgctctgttgctcaggttggagtgcagcagtgcaatcacagctcacagcctcaacctcctgggctcaaacaatcctcctgccttagcctcctgagtagctggggccacaggcacatgtaccgccatgcctggctaattacattttttttttttttgtagagacagggtctcactatgttgcccaggctggtctcaaattcctgggctcgagtgatcctcctgtcttggcctcccaaagtgctgggattacaggcatgagccaccatggccagctacaagaataaatcttgtctcagtatcaatggatccaaggggcaagaccctctctctcctaagtcctgacattcccccagtgcccgggccgggatggggacttgccagctggggacttgccgcaggagcttctgggggagagtctgaggacttggcggcctcactggggaggggagcgagcgggggcagggaaatgagggagggtcctctggggaggagacagggaccctgcgttcatagcgggaattaacaagggcagaagaggaaaggcgcccgagaggagccccacggcacgctcactaccccacagcaaggctgctctccgctgggcgccacagctcacgcctggaaccccagcactgtgggaggctgaagcaggaggatggcttgagcccaggagttcgagaccagcccgggcaacacagtgagacctcagcttatctcttttttttgagacggagtctcactctgttactcaggctggagtgcagttgcaccatctcggctcactgcaacctccgcctcccaggttcaagcgattctcctgcgtcagcctcccgagcagctgggattacaggcatgcgccaccacacccagcaatttttttgcatttttagcggagacggggtttcaccatgttggtcaggctggtctcaaactcctgacctcaagagatcctcctgccttggcctcccaaagcgctgggattataggtgtgagccattgtgcctggcctctcacgtcaccaatttaacaaaaattaaaataataaaacatttaaaaaggttgtcctctaactgtgccgggcgccccgtcagtgtgtagagaccagtgggtgagctggcagctcccgtctctccaggccccacaacaatggggtttcctgctttgtgaggacgtctaggaccagtgagcgctcaagcccgtccatcggccgccacgaggcttcacgttggtaactcagaggttttgtgggtttgagagaagaagagccagcagggagccccacggctgcccccctcgtcccactgcccccctcgtcccgctgcccccctcaccccactatccccctcgtcccgctgcctgcctcggccgccaccccactcacctcgcatgtactcaatggtgccgtccagcacaaggttgaggagtgggtcgaagcccttcaggattccactggcttggagaaatcaccgggggagagaaaagagaaggcatgagatccgtcctgggcgcagggcccgccccagcatggcccaggtatggggctaactgctccagggatggaggactgagggtaggagagggctcccgggagtggccgatgacagccgcctccagagtgatctccaccacaggcagcagaccacgtctgcggggggccagatggcaaacacttctggccgtgtgggccacagggtgccggtcacagctgctggctcgggctgcctgggtggaggcagcttcggtaatgagtccatgtgtggctgaactgcggccggtcagctctactcacaggcactgaactgtgaatttcatgtaatttccacatcgtgagacagtcttgttttgatccctttctagctatttaaaagtcataaaaacaattctcagctcaaaagcagcagcaaaacaggcggcggcacgtgtacgcggtgggaccaccagccaggaagaggagcgaggctggcgcaggccacagcgcggatgcgcctgaggacgcacctgaggacgtcacgctcagtgagagacgccagacacagaaggctgcgcaccgtgagatcccatttctatgaaatgtccaggacaggccaatccacaaagacagggaagggatgcgtgggtgccagggccagggatgggacaggcagtgatggctgatggggacagggcttcctgtaggggagacagagtgctccgctctgacagcggtgatgactgcgctgcctgacctgtgctgagtccctcagtgagttcacggaatacaaaagaacaaatcccagccctgctgcttagggcttgcggggagcaggcaacagagatgctctgagacccaggtgcaaaggcttcgggggctgagacggtctctgtggcttctctctccacgctgcctgccccacccctcaagcttcgccgccttgggccacaacttgccaacttaggttagggctctctgacccggtggtgatctctgccatctgatcctgctccgcagtgtctggtgacactgagaagggtgaagggggagctgtgtgtccccagcagaggccagcccaccctctctgcctgggactcccctccactgccctgcaggctcctgcagccgaggcccagcagcagctccacctctgcgctcactgaggggcgtcccgcagccaccccctccctgctctccttcttacccctgtcatctttcaggtgcttcctccagacaccaacccacagcccttacggtgctgccctctgcacgcccacgccaatctcaggaagcaggcaccaccaatctcgggaagcaggcaccaccaatctcgggaagcaggcaccccgggcattattctgcctgcctgtctcctcccaaggcagggccgagagcccgtccacggctgctccacacacaccgagggccgccctgtgcggtggtgcgggggagggtctgcaaactacgacccccaggtgaacctgcccgccgctcctctctgtaagtcagagtctcgctggcccaccaccacactcgcccgctcaggcgctgaccagggtggctctcctgctctgctggcatagctcagtggttgtgacagagaccatctgggctgcaaagctaaagatatttgccgtctggccttctacagagaaggtctgcccgcctgcatacaagcttccgtccacctccacaggcttcagcttccacctccacggctccctctctctttgctcaagtccctcccctgcaaaatgaaactcacctataagatggggtcagatgcagatgttcaggtccttggcaccagcctgaccagtgagcccgccctcctcacggggagagatgtgagcactgaggtaggtaggtctctaacatggagccaaggtgcccctcctctggagtgtgggctagggcctgtgactctgacgggacaagatgtcactcctgcgcttaggttatgtggcaaagacaaggaactttgcagctgtaattagagcccctgaatcagctgactgagccaatcaagagagaaacaccctgggtgggcctgactgcatcaggtgagcccttcagggaccaaaccctttctgctttttgtgtgtgtgtgtgtgtgtgtgtgtgtgtgtgtgtgtgtgtgtgtttgagatggagtcttgctctgtcgcccaggctggaatgcagtggcgcgatctcagctcactgcaacctctgcctccagggcgattctcctgcctcagcctcccaagtagctgggactacaggcatgcgccaccatgcccaaataatttttgtatttttagtagagatggggccttgccatgtaggccaggctggtctcaaactcctgaactcaagtgatctgcccgcctcagcctcccaaagtgctgggattacaggcgtgagccacagcgcccagttaattgttgtacttttagtagagatggggtttcgccatgttggccaggctggtctcgaactcctgacctcaggtgatccacctgccttagcctcccagactgctgggattaaggcgtgagcccccgcacccggccccaaaccctttctgaaagatgattctcccactggcccgaataactgaatatggacaaatgtcagctcagcctgcagcactgtaggggcagaccaccacggtggaacagagtcccgagctggcagcgtccgggagctgcaagtgtccctagccaacactggccagaacggggaccctggccctgcaaaggtaaggcactgagctctgtcaataaccagtgggctcagaagaagaccccaagatgatggaccccaaaaaacaaccctcagttacaacctcctgagagcccttgaggctgtggtaccctggctcctgactcacagatcctgtgagataataaaatggtgctgtttcagctgctaaatgggtgatttgctatgaagggcagaaaacaaagggaagcagtgtgaccagcaagagcggccgctcactcatgtccttccatgtccggagtcagcatggtgtagactgagaaaacattttattcatattcctttttctttttgttttgagacggagtcttgccctatcgccaggctggagtgcggtggcacaatctcgcctctggggttcaagcaattctcctgcctcagccccccgagtagctgggactacaagcgtgcgccaccatgcccagctaactttttgtattttagtagagacagggtttcaccacgtaggccaggatggtcttgatctcctgacctcctgatctgcctgcctcggcctcccaaagtgtcaagattaaaggcatgagccactgtgcctggcctcctttttctcttttgagactgggccttgctctgtggcccaggctggagtgcagtggtgcggtcatagctcactgcagcctcaaaccctagggtgaagccaccctcctgcttcagactcccaaattgctgggattacacacgtgagccgccccgtccggctggggcactgtgatttttaataactctcatgccacccagttgtctacaatccagggacaaagaggtttgggtccccgtcttacaaaaaaaagaaaccaaagatccaagaggctattgaataagtgacgtgttgtctgactgcttacttcctgctgagagctgcctcaattacattacatgcctgtaaccattcattctcaccaccccctgtgaagtgggtggagttaccagccccatttgacaaatgaggaaacggaggctaggagaaggcagctcacttgcccagtcaaaaatgctaggctgggcatggtggctcatgcctgaaatcccagcaatttagggggctgaggcaggcagatcgcttgaggccaggagtttgagaccatcctggccaacatggcctctctactaaaaatacaaatattagccgggcgtggtggtacacattaattccagctactcgggaggctgaggcacaagaatcacttgaacctgggaggcggaggttgcagtgagctgagatcgcaccactgcactccagcccgggtgacagagcgagactgcgtctcaaaaaaaataatgaaaataaataaaagaggtgcttccgcatgcgtcctcatcatctctgttgctgggtttatttgaaatttttaaagagggggtaccgacagcgggagcctcctcaccttcgcggcctccctggaactttacccggatcgtcttgtcgatgtacttggacaagtccaagatgctctcctttttcttcttctccttatcctgcggggaaagcagagcgcatgagacctggagcgcggcccgagctccacgccccccggctccagattccgccgcgcgctcaccgccatcttgtcgcgccgtgtggctcttcgcaggcaccgccccgcgccctttgacctcccccacgcgcatgcgcggcgcatgcgtggcccggggtctcggggcgttgctgggaaacatctgccgttggttgcggcgggcaccggccgacatggcggcagcggtggcggctgcgctggcgcggcttttggcggcctttctgctcctcgcggcccaggtgagcgcggcaccggtcccgacggcaccgcgggctgcggcccttcggcctctctgtccccgggctacgcgcaggaacgaccccgctcggcccgtcttgggggtccagcctcggggatccgccgtccccgcgttgtcggccggcggtgccggggctcggccgtgaccttgcgggtctgtccccggctcctctcctttccccgcctcggaggccctccgccgctgcagcgccactcacttcccaccgggtctgaaatttgtgccccctccatcctccggttctgcttctccgtttcggggtctccagttgccgccggggacgcctctctccggctctgtggccttgagcaggcggctgcccacccctctccgagcctcagtttccccttaggcggaacgggcacggtgctaagctaacctcaccctagggggtgcggtgggggaacccagaggcgtcccgcgcgtcccccagtaactggcagcatcctggagcggccaggagtccagccctgcactggggtcggatccccgctccatcttttactccgtgaccttggacgatggaattcgtgtgcagaaggaggaccgactatggtgtggattctggaggttctgtccagggtgaccagcgcccagggccaacaggccttcattatgttcattgtgtgtcatttgatgtaaagagtgtcaggttctagtggggacagtctacgagatcgcactgtcataactgcatcttttattttcttaattccaaatcttccctctctcctgagttcggtggctcaggcaatggaacctggagcagccccacaaatgcagcccttaaccttcactaccccctcagagttctcactcttaaggcgtcgccgccacctggctcctcagtctccactcctccagccccaccgctatccctctgctgtggctgcctttgtccaccacatccccagtccatcctcgacacagcaggggtgaccctttcaaagtatgtcagaccgtgtcgcatccagatgagtgcgccgtccagttgtgacctggctgctggggaagcctgcagctcattgcagtcgcttcactctctagtcttttctcttaccctgagatgcccctggtctctgcaaggctgtcgggccccctcggaagctttctgagaaccccagtcctacccccagctgctctgtcagccccctttggactccccccattctgcagccaggcacctagagctccccagacatttggaaggagggggaaagccagaggtggaagaaagatcacagaactctgtggagagagggactcagtttgcctgggaaggcttttccgaagcagatctattttttttttttgagacggagtctcgctctgtcgcccaggctggagtgcagtggcatgatctaggctcactgcaacctctgcctcccggttcaagcaattctcccacctcagcctcccgaatagctgggattacaggtgcatgccaccactcctggctaaatttttttttttttttttttagtagagacgaggtttcaccatgttggtcaggctggtctcgaacttcagacctcaggtgatccacctgcttcggccacccaaagtgctgggatgacaggcgtgagccaccgtgcccggccccgaggcaggtgttctgaatgatgagtaggagtttgccgggtcggcaggaggggaagggtgttggaagcaccagaagcagcataagcgggggctgggaggtgtgagagctggcaggttatttggggttggcaaggggtgggctgtggctggagtgtagggtggaataatgctggaaggaagggtttacaccctgaaagatgtcaccaccaaggaggcccggggggtgggccgtggagggttgctggagcaggggcacagaggagggggcagtggtgcgagtggccccaggcagagagtgaaggcagagcattcagcctcctagtctggatgacaggttgtctggtggaagccaggccgtggaaggcgcttggtgctggggtgcgtggactttaacctgggcgggctgaggagtgtgagctttatccggagggtggggagtcaaaggatgtgtcagagggacgtgagagagcaggtgttcctgccccttccagaaccctggttgtaaatacaccctgagacgcctgtccctggaggggggcagtgcttcgcggcagtggaaatttgagtccgattgcccaagaatgagacttgctctcagggcaggagcctggttggtgacagtcctcaactcgcttgcttgctaccattctgtgaccctgagcaaggaagtcgacctccccagtgagacacctcccttcccccaccccacggagcccgctcctcagcagatctgagctggagctggtggccctggctggacccggcccggctcctggaactcctcagtcttcccagaagggaggctctccccgcctggactcactggcctgtttcaaaggcccttgatgtggatgctttcacagtcacttggaagcggggtttctaagcctagtagtttctgaacctgtgtgcggttgcaaagcgtttgtgctgcaattgtgaaggatttggaggtcgaggcttgggctttgagcctgtccttgtagcctgagctttttctgctcctccaaatttcggtgggcctgtctagaactcagggccctcttagagctgtggcctttggaagaattgttccccgttcctttaactcagcaggtgaggaaactcttcccggtgagatgccgcgttctctggcctttgatagaggcacaggcttgtttttttaatggaaaaccagttttgcgaattgtggagaggaaaatgcatgaatgtgcttttgtgcttttaaatgacccttttagagagaagcagagaagcagttctatcagttcccattttacacaaaagacacttttcaccagagtccctgatcccatagaacagagcttggcaagtgttttctgggaagggctagacagtagttttgctgggctctgtggcccacgtggcctctggtttggttgcttggtttctcctgttgttcttccagagccggagacccttccttaggaatgggcttggctgtgttccaataaaactttatttacaaacacagaaggtgggccggactgtggattcttggcctctgccgtgacccataacatccctcctggaggaggggttctggggggctgtgttggaaggggcaccctccgggctcggcaccggggccagactaaggggtgctctcacgggcaggcagtctggtgggcagaactggaaagaaagggctcctgactctgcctgggctctgggggaggtcacatgggaggtgcttggagtggggctggggcagctgtgggaaggaagcagcattagccaagagctatgagacccccagtcgattgtggggaccggggctccgtgggctttcaccatgctgccaccccgaggtcaccagggccttgacccagatgctcccagaccaggccggagactttgcatgatttcagtgatgagggcccggctgttggagagcccgtctgtgcctgtgtgctggggttggtgtctggcaccagggacctttgggacctttagccaagccagagctgtccttccccagtcctagcttggcagagctgcgtctgcactgttttcccttgtggcgttgtggtgtcggcccgtttggtgcgcagctcagcatccgttcagacatgtggctgccatcctgttcctgatgaggcaaatggctgtggcctgtttgtttccgtgacaggtcccctggggaccagggggtgcggctgtctctctgtctgggaggtttacagcctggcaggagccctgcagccccagaaggctgagggctgggtgctcctgagaacgggcaggcctagggcatggggtgggtctccttggtccctggcacgtggtttttcttctgggacccctcctccctgtgcaggccgggctcccctgggggcccacactgagggtctgcagtgtggcacagcagctgggacctgggccccatcgctgtgagaccctctggtgactggcatcctggcgagatggagatgtctttgtcagctgctgggtgggggccctgggcaggggagcagaaggaaggtggggatggcaggtgcgggcggctggactgggctctgctgggagggggagcaggaggagggtggggatggcaggtgcgggcggctggactgggctctgctgggagggggagcaggaggagggtggggatggcaggtgtgggcggctggactagactctgctgggaggggagcaggaggagggtggggatggcaggtgcaggcggctggactgggctctgctgggagggggagcaggaggagggtggggatggcaggtgcgggcggctggactagactctgctgggaggggagcaggaggagggtggggatggcaggtgcgggcagctggactgggctctgctgggaggggagcaggaggaggtggggacggcaggtgcgggaggctggactgggctttgcgggagcaggaggaaggtggggatggcaggtgcgggcggctggactgggctctgctgggaggaccgtggttctgcctaggccagagccctgcagtgtccgccgtggtccctgcggtgggaggcgtggtgagcagtgccagcttcctgcttgtggaatccgtctttcctcatagctccatcctgctctgttaagcattaaattgaagaggtgggggtcgtcccttctggtccaggcccgtctactccgcagccctcctgggaggcgtccagggctttggggcctggtcctgccccctacttcattttgagagcgtggcaagggccccagcccgttctgtcctgggcgcggtggccaccacccctgcttctcttggctggctttggcctgttgtccccgttgtgtgtcaggggctcctgcccgtggatccgggccttctccctgtggccttctctgagctgctgctgctgcaggctggagagcaggaacttgaagccctggctggctgttccttctccctcctgcgaagtgggagctgctgtgctggactctgctgctttggggcttcatggggaacatgacgctgtctgtcctgctggtggcagcgtgacctgttgcaaacctcagcctgtcccactcaggacccggtgcccgtaggccccttggcccacctgcttcctgctgttctaccagtgggagctgaggggtgctgatctggggatccccctcgtctgggccccaccgtgtgcctgggcccccgtgtgccttggagcaccagccaacaagcagtgcccacggggctgtgggtcaaaggccacccagacctgaggggtgcagaggcttgcttgtccaggcctcccgcccaggctgggggccaggtccgctggggccctgccctgcttccctgctcagggctctgcccgtggctctgcccgtggctgtcattctcccaccgtgcccactgatcctgggaggcccaggaggtggtgcgatccctgttttttggtgcagaaactcgggagccacaaaggggtgacctgacacactcatggtcaccagcctggggctccctgaggaaggtgagccagtctgggtctttgctgtaaaccacgtatggtcacgtccctgtctgtcctgtcgagagggggaagcatcccagaccacctggtgaacatgggcgcccttcctggaggcgtcctcccctcctcgggcctgtttctcgtggggcggtgcagccccgcacgtcccgtgctgtggctctgactgctggccttgtcctgcaggtggcctgtgagtacggcatggtgcacgtggtctcccaggccgggggccccgaaggcaaagactactgcatcctctacaacccgcagtgggcccatcttccgcacgacctcagcaaggcagtgagtacccgctggccgggcgccgctgcggaggagaatgcgggggccccggggctctagagacacatccggctggggttgcaggaaagatccagaggcgagaggcaggccctgaccaggtctgggggactcttagctggcccccagttcccctgggcctccccaaccctggtcatcaatgcaagctgtccatgcggccttggggtgcagatccagaggcaccggccgagctccatgtggtagataagggtctctactgctccatgccggggaccctatccagtgggcccagacagaggggtcctcagaggagtaacagcagagggcacagtggggccccagggacgagacctgttcctttcaccgtcttcctgactggggcactaacacctgctgctggatgagtccctccctcagaggccccacctcctttcccacttagtcctcatgccccgcctcctttcccaccgcatccctcaggccccgcctcctttccactgcatccttcaggccccgcctcctttcccactgcatccttcaggccccgcctcctttcccactgcatccttcaggccccgcctcctttcccactgcatccttcaggccccgcctcatttcccactgcatccttcaggccccgcctcctttctcactgcatccttcaggccccgccttctttcccactgcatgcttcaggccccgcctcctttcccactgcatgcttcaggccccgcctcctttctcattgcatccttcaggccccgcctcctttcccactgcatccctcaggccccgcctcctttctcacttcatccctcaggccctgcctccttttccactgcatccctctggccccgcctcctttcccaccacacccctctgtccctgcctcctttcccactgcatccttcaggccccgcctcctttcccaccccatccctcaggccctgcctcctttcccaccgtatccctcaggccctctctcctttcccaccgcatccctcaggccccgcctcctttcccactgagtccctcaggccccgcctcctttcccactgtgtcccgccccctcctggagccctcgaggtgtgccggcgaagaggcactagcatcttcctgtcagctttatgcatagtgtgtgcgtgtgagcacgtgtgtaatcagtatgtgcctggacatgctcatgtgtctgcatgtttatgtgagtttgcatcagtgtatgtgtgcatgtgcctgagtgtttttttgtgtgtgaacacataggtgtgtgtcaacacatgtaataggtatgtgaacacatgtaataggtatgtgtgaagacatgtgcctgagtgcatatttctgagtttgtgtgtgtgagcacatgtgtactagatatgtgcatggacatgtgtgccttagtgcgtgtttgtgtgtcagcacacctgtgtgtgtgagcatgtgtgtaataggtgtgtgggggcatgtgcatgggtctgaatgtgtatgtctgtttttatgtgcacatgtgcctgtgagtgtgcatgcaatagttttgtgtatggatgtgtgagtgcatgtgtgtctgtatgtgtgcaggtgtgtgtaagcatgtagctacataatagttatgtttgtggatgtgtgcatgtgtctgcacatgtgtgcgtgtgtacatgtgtaataggtctgtgtgtatgtgtgtgtacatgtggataataggtttgtgtgtggatgtgtatgtgcctgtgtgtttgggttcgtgtgtgtgcatgagtgtgtgtgagtgcatgtgtaataggtatgtgcgtgtgagtgtgtgagttcatgtggcgtgtgtgtatgcatgtgtgtgtaataggtgtgtgtgcgtgagcttgagtgcacaggtatgtgcttgtatatgcacacgtgtgctgtgtgctctggcctggctgtgtgtgcgtgtgtgtgtgcatgtgtgtaataggcatgtgtctgcttgagtgtgagtgtgcatgtgtgtgcttgcgtgtgcatatgtgtgccatgtggtccggcctggctgtgtatgtgtgcacgtgtgtgtgcatgcactccagcctggctgtgggtgtgtgtgtgtgtgcgcgctggcctggctgcggctatgtgcgtgtgtgtgtgtgtgcactccagcctggctgtgggtgtgtgcgtgtgcactggtctggctgtgggtgtgtgtgtgtgtgtgcatgtatgcatgtgtgtgccgtgtgctccagcctggctgtggacgtgtgcttgtgtgtgcgcgtgttccggcctggctgtgggtgtgtgtgtgcgtgtgcgtgtgtgtgtgcgtgtgtgtcttggcttcaggggctgtgaggcccctgagagttggggctttgttctctgcacactggaaaccctcccccttctcacagatgcctggccgtggtggggctgcggtggggacccacttggtcttgctgagtgatctgtgacggctcgcggggtggctcaggtatcaggggacagccatgtctgtgaggactccggccccgctcagatgaggcagcccagcccgtcgcccagggtccggctgtgggagctgcagtagggatggctctgcctaggtgggccgaggccgtgcggggctttaggtgagggctgggatctaactcagcgcaggcttcaggtgggagaacgggcagctgggccctcctggtgactcacatcacgtgagacaacactgtgccctggcctttccagtctttcctgcagctgcgcaactggacggcctccctgctctgctccgcagccgacctccccgcccgtggcttcagcaaccagatcccgctggtggcgcgggggaactgcaccttctatgagaaagtgaggctggcccagggcagcggagcacgcgggctgctcatcgtcagcagggagaggctggtacggccctgtgcgtcccccgctgggccagctctcaggggcaggaggggggtgcaggaggcagagatggcagcagctggggctggtcttccgacttctcgctaaaggcagatccatctgtggggaggatctgggccgagtgtgaacatggggaggatccgggccgagtgtggccgtggggagggcggagatgagtctgttcttcctgagctgctggctggggctgtggaactttggccgtggtcttgttgggtgcctgtcctagagcagcccccaggggtgacggagaccacactctctgtggggatgggattggggtggcttctgaggagcaggtggcctggccctgagctggtcctttctgggtaccctggtgcccttgccctctagccggtggggccgtgctcgcctgtggtcctagccaggtggcctgaagcctggccccttttccatcttctgtgaaatggggctgtggttgagagctgggggcctggcagggctggtcacagcacagggacatgccgactgctgggctgggcagggtgcgtggccgcccctgaagtgtagttttggagtaagaaggaatggagttcaggaattccctcacagctctgcctgtggctctgggctgcccccgccagtgttgcaccctgagcctggcaatccacggaggcctggtgcaggggctcagggccgagggcagagcaggccgggcagagccgagagtgccatccctgtccgcacacgctgccgtcgtagttgagagaggccctcagtgggtgcggggctcaaggcggcttagtgggcaggcatgggctgtgacaagtatcactcaggacttgtatgtgcggttcgggagtcccacggccgagggagggattagtggcgcttttaggcctggggccctgttgtcaggtgaagaaggcttgatgcccttcggcctccctgttcttgggtcctcctggggggccggaggctgtcagctgcagagggggagccagcaggcgcccccagcctgacccgagcctcgagtgagggtcccaggagaggaggcgaatgggcacagagctgggggcccacccactgctgcgggtgatgcctgccgctccctcctctgggcccccaggtccccccggggggtaataagacgcagtatgatgagattggcattcccgtggccctgctcagctacaaagacatgctggacatcttcacggtaggtctgcgccggctcagacccacgctcccgaggagatggggcagggggcttcgggctggctgccgggggggtttgtgcctcagttggtgggatcagggtggtgggtgaggcgtggcccctgcaggccagggtctccagccccagccccacagcccacagctgcacgtcgacccatggctggcgggtggctctgacgcctgcctccggtgtgttccttgaggcagcgtttcggccgcacggtgagggcggcgctgtatgcgcctaaggagccggtgctggactacaacatggtcatcatcttcatcatggctgtgggcaccgtcgccatcggcggctactgggccgggagtcgggacgtgaagaagtgagtttcgcatcgtgcgtgtgctgtgacggggtcgggcggctctgacacgggccgggacggccagtcttccagaacagcagtgagtgctttggcctcggcaggcacggctcgccccgtggagcccttcgtttcttcctcaggaggtcctgggacagaatcagtctcttttcctgccagggtgggctccgggcacctggtgggtgtgtagggctgggcaggtgtggatgtggcaggtacgggcgtggcaggtgcagggctgggcaggtggctggggccagctaccctcttcctgctgagccgcctgggtctggggaggccccatgtccagggctctttatgcagatccaagctgcggttgctgcccacacgccagcctctggcccggcctagtggccaccccagctcaacccagggacgcgggccctgccaccctctgctgtgtggtctcctctgccctggggacgttcggggcggttccttgcacttcagtcccccccgggtcccctcctgctcccgggttttctgccccgttcccccgggtggctgtgggctcccgagccccgtgtcggccagccggccccagggccccacgaccccatggtgtctcccaagaaggtacatgaagcacaagcgcgacgatgggcccgagaagcaggaggacgaggcggtggacgtgacgccggtgatgacctgcgtgtttgtggtgatgtgctgctccatgctggtgctgctctactatttctacgatctcctcggtgcgcggccccgggcgggtgggccgcggcgtggagatgcagcccgccccgtgcggagggagggtggcgtgcgggcctggcccccggcctcacggccctgcccctgcagtgtacgtggtcatcgggatcttctgcctggcctccgccaccggcctctacagctgcctggcgccctgtgtgcggcggctgcccttcggcaagtgcaggtgagtctgccctgctggccccgacgtgcctgactctgtgcggtgatggccacggcccctttgccgccccatagccccccatggtgcaatattgctcagagtctacagcaggcgctccctcagtgctggcctggggctcctaggcccaggagcagggcggagtctgggcgagctatcaatggagcccaccagcagccaggcgccaggggtggcggggggagggtgcccttgtccccaggaaccctgccccaggtcgcaggccgaaccctgggttccccagggttctccggggaacccagaaggttccccacagcccagagcttggcctggctcttaggggtaaagggagctgctggggggtctccaacaaagtcagacctgggtctaggaagcggggctagcccagggggagacctttttgtgttgccgtccctgggtgaggaggtgggaggtctggagcaggcagggcctcgggcgaaggggcgcagcgcaggcgaggggctctgtgggtacagcccgtggcccccagcgcctgcccgggtcgggctctgccctgcccttggggtgcctactgttgtcatcgtgtgggatgtggagtttaatgaggacaacagagtgggggctgccactctgcagggggtgcctgggccggtcccaagggtggtgggcagtgggatgaggccgggagctggtgggcttggctctgactgccccgtgccccccaggatccccaacaacagcctgccctacttccacaagcgcccgcaggcccgtatgctgctcctggcgctcttctgcgtggccgtcagcgtggtgtggggcgtcttccgcaacgaggaccagtaagtgctgcttcccccgggccccggcgggcagcggagtcctcgggtgcaccagggctcctggggccctgactccctgccctccctggaggccgccccagcctggagctgcttcagcaccgcgtgatgaagagccctggccccgggctgctctgacagggctgcgagggcgtttcacctggggtttgtccgggtgtcatgggaaccctgactggaatccgggaggagaggccggagcccctgtggccaggagccacgtcctccagcctggatgggactcctttgtggggcatcgctgcccagggccacagtctgtcccccgctgtccctttcctggcacccacgtgcacgccgcaggttcgaggcccagggtgtgggcaccagggcacccggtcctcttggtcatgactgctgcggcttctgagcagtggtggaggtggggcaggcactgctccccccacgctcacctcccacgtggcctggacttgtggctgcctcccgctggccgggcctcccccatgaggccgagtgcctggtgccgtgttgggaggacagagctggcccgtccccgcccggtccccaccgctgtcgctgataccatctggcacttcctcccagccttcctgaggcagccaagtacgcttggctttggtgtgtattggagccacggcacgtttaactggcagaaggaagatgtgaaaatattttgaatcctttgtacacaaagagaaaatgaatcttttcagttatttccaagccaggaaactcgctccgtcacatgaagttagagcaggcctcagtcagctgggcgcaggggctcacgcctgggatcccagcatttggtaggccaaggcaggacgatcactttgcccaggagttcaagaccagcctgggcaacaagcgagacgccctatttaagaaataatataaaatcagaaaaaataactggccgcagttctctgggtgcttgaagtacgtggcgcctggaattggctgtaccagcgtctcccatggaggcctctgctgttagcagccgccccgccctggagatgtttttatcccattttcaaatgaagcctttgatgtttgagacgctgaggaacgctggggaactcgtccagcaagtgacaggcagagcctgcattgggggcaggggccagcggggaggggactctggggcttcgtggggccaggagagagccgaagttgcggctggctgcaggggccgtggccttgtgcaggaggcagttctgtgctttgccccagggcaccaaccgcatggcagccccacccactgtggacccagaggttctttgaggaaacctggtgtggcacaagttttaatttaataaacagtttgggcacgggggctcatgcctgtaatcccagcactttgggaggtgaggcgggcagatcacttgaggtcaggagtttgagaccagcctggccaacatgacaaaaccccatctctactaaaaatacaaaaaaatttgcctggcattgtggtgtgtgcctgtaatcccagctacttgggaggctgaggcaggagaattgcttgaacctgggaggtggaggttgcagcgagtcaagatcgtgccaccaaactccagcctgggtgacagagtgagactccatctcaaaaacaaaataaaaacagtttggaggggtcagtgcccaagccctcctgcgcacgcaccctctgcctggcccctgcctacagcctgtgacccctgcctacagcgtgacgcccaccatccggggacagtgactgaggggacgcagccggccaggcccgtgtccaccatcctggccccaccatccggggacagcgactgaggggacgcagccggccaggcccgtgtccaccgtcctggccccaccatctggggacagcgaccgaggagacgcagccggccaggcctgtgtccactgtcctggctgccgagtggtgggctcctctacctgcttccgcagggtgggccctggggtggggcctgtgccgccagccctgctggagttgtaacagcaggggtcctcccacaggtctggggtcctcagagtcatcccctgggcaggtggaagggcagtggggctgcgtgctggctgagagcaagggccctgtgtggctcgtgggaggcggcgtcctgggtggtcagccagcctctgccccggcgaggatgctgctttgtcttgcaggtgggcctgggtcctccaggatgccctgggcatcgccttctgcctctacatgctgaagaccatccgtctgcccaccttcaaggtgagtgcagggagggcacggctgcggggcagcatgggtagtgggggcccttcatcctagcctggcccgtgtggggctgtggtccttgcaggtctgtgctcctgctcactgccctggggatggccgcctaggcctgttgtgaagggtggggcttgaagattgggtcccaaagcccccgctgaggcggcctgggtgggtggctgcggggcggttcccggcaggggcaactcatgtctagatgaggtggtggtgagagtggttgaatagggctggaggaactggcctcaggtggtaccgggagtgcggggatgttgtcaagccccaggcggctgcactcccgtgagggccccacagcaccccaagcaagcggcatttgaatgcccaggatggccctctgtatccccagagccggccctgcgtggcacaggcctccgccctcccgtccccgccttcctgttacgtggagactctaaaagcctgacttttgcccgtaaatccctacctgatgttgcttccaaagctcctcctgcgtggtgcgtccctggcactgggcacgctctgctcaggttcctttaaaggctgcctcccaggaggaggcgctgggcctcatgagatgggagtgggggaggcacgggccggggtgggggccgccctcagccgtgggcttcgcaggcctgcacgctgctgctgctggtgctgttcctctacgacatcttcttcgtgttcatcacgcccttcctgaccaaggtaggcgactgcctgtccctgctccaccccatcaccccgctcccccgccccctcgcaacccccgccccatcaccccccccatcaccccgccccctcgtcccgccccctcgtccccctccaccccacaccgtgctcccctgccccccaccccatcaccccgctcacctccaccccatcaccctgctcccctgccccatcaccccccatcaccctgccccttgcacccccccatcgcatcaccctgccccctcgccccatcaccccactcccctgcccccccaccccatcaccacgctccctcactcaaccccattctgtgcagagtgggagcagcatcatggtggaggtggccactgggccctcggactcagccacccgtgagaaggtgtgtcttctgactgcagggtctcaggttgccatgggtcaaggtgttgcgcggagcggatagggctcgaggcatcccgcggccgggtgagggtcctggaggacattgtcctcttcccgtctttgcagctgcccatggtcctgaaggtgcccaggctgaactcctcacctctggccctgtgtgaccggcccttctccctcctgggtttcggagacattttggtgccaggtactgaggcgggtggagcacacgggtccacgctgtggggcagggccccgggcggctgaggtttgcctttgggagtgagtggcccgcacaccgtcggctggagataaagccctgagggtcagagtcgggcaggttggggccgttgaggcctgggtgcctgggcagcgagggcattgcctgggtggggtagggaccccctttgttcctagggagcggggaaggccccccgattgcagacagcctcaccccatcctgctcggggttgtgcaggggtccttgctggggcctggatcccgggtcccagtgagctcatgttgctgcagaaggcagagactgtaccctcgcagcctcagtgtccccagggtcctgccaggtgtgtctgcctggactttgttctcactgtggtctcagtttacccactgagagtcatggcagccctgtcccgagcgagcgtgtggcctgtctgtgaaatgacagcagccaccaggcagcgagaggcccacggcgcccacaggtgctcaggtgcccgcccgctcccaggaagcccctgctctgaggctctgcgggcccgagtaagcctccgccctgtgcctcccccagggctgctggtggcctactgccacaggtttgacatccaggtacagtcctccagggtatacttcgtggcctgcaccatcggtaagtgcctcggttgggcccgtgctggcctctctggctccagccccaccccgacttagcctctgtcctgaccctgacccctaaccccaaccccaaccctaaccctaattccaactctaacaccgtaaccataacaccctaaccctaaccccctggccactccgggagctgggctcgggtggctgggcctgtgcctgcatccccctctttctcattctccccgggcctgtgcctgcaaccccctctttctcattcttcctgggcctgtgcctctgtccccatcttcctcattcttcctgggcccgtgcctgcatccccctctttctcattctccccgggcctgtgcctgcaaccccctctttctcattcttcctgggcctgtgcctccgtccccgtctttctcattctccctgggcctgtgcctccgtccccctctttctcattctccctgggcccgtgcctccatccccgtctttctcattctccctgggtccgtgcctccgtccctgtctttctcattctccctgggcctgtgcctccgtccccgtctttctcattctcctttggcctgtgtccacatcctggtctttctcattctccctgggcctgtgcctccgtccccgtctttctcattttccctggcttccattgttctgttcttttcttttccttttctttcctgttttcctctttttgtctttttcttctttgccttgtcttctactgtttcttttgttatgaacgtatttacgcaaagtgctgttatctgttgacccacattgttttgaaaaatgtcccccaccgcagctggccctaaggaaagaagctgtggtgctttctggttcctgggcacagggccaggccaggcctcctctgccgagccacgcccccgaccctgccctccacgtggctccctaaacggccactcccagggccaggagagttcaggccggcctgtcccctcacacctgcctcctgcagctgcaggtgcccctggctttcccctcgcccgattttactgtcttcatgattatcctttaaaatcacggctgaggccgggtacgggggctcatgtctgtgatcccagctttctgggaggctgaagtgggaggattgcttgagtccaggagttcaagaccagcctgggcaacatagtaagaccctgtctctgcagaagaatgcaaaaattagccgggcatggtgacatgtgcctgtagccccagctactctgcaggctgaggtgggaggatcgcttgagcctgggagttcaaggctgcagtgagccatgatcgtgccaccgcactccagcctaggcaacagagtgagaccctgtctcgaaaaaataataataaaatgaaagaaaaaataaaaacacagctgcagagatttgtctctcctgaaacataacttgtcaagttgtccctgtaattcctgagactgaagccgctgaggctttataggtgccagccctccctgtttgtgtctgtctgcgtctgttgatgatggctgatggacacgtggatggcctaaaatggaccaatagggacgctccccgtggcatggcgtcagaaatacagagatgggtgttagaaaaagtgccgggagcagtgtgcttgctggacacagcggctctttttttaagagtgttctagcaaataattaattttctcagagctttattttgaaataatttcaaatgacagttgcaggatcgctacagagaactcccgtgtgccccgttctcagagggactggtcatttcttcacattcgcttgattccgttctctctccctccacacacacttacgcgctctcattcacctgattccgttctctctccacacacacgcgctctcattcgcctgattccgttctctccctccacacacacactcacgcgctctcattcgcttgatgccgttctctctccacacacactcacgcactctcattcgcctgattccgttctccttctctccacacacactcacgcgctctcattcgcctgattccgttctctctccacacacacacactctcattcgcctgattccgttctctctctccacacacgcgctctcattcgcctgattccgttctctctctccacacacacacactctcattcgcctgattccgttctctctccacacacactcacgcactcttattcgcctgattccgttctctccctccacacacacactcacgcgctctcattcgcttgatgccgttctctctccacacacactcacgcactctcattcgcctgattccgttctctccctccacacacacactcacgcgctctcattcgcttgatgccgttctctctccacacacactcacgcactctcattcgcctgattccgttctccttctctccacacacactcacgcgctctcattcgcctgattccgttctctctccacacacacacactctcattcgcctgattccgttctctctctccacacacacgcgctctcattcgcctgattccgttctctctccacacacacacactctcattcgcctgattccgttctctctccacacacactcacgcactcttattcgcctgattccgttctctccctccacacacacactcgcgctctcattcgcttgatgcggttctctctccacacacacactcacgcgctctcatttgcctgattccgttctctccctccacacacagactcacgcgctctcattcgcttgattccattctctccctccacacacactcatgcgctgtcattcgcttgattccgttctctctccacacacactcacgctctcattcgcttgattccgttctctctccacacacactcgcgctctcattcgcttgattccgttctctctccacacacacacactctcattcgcctgattccgttctctctccacacacactcacgcactcttattcgcctgattccgttctctccctccacacacacactcgcgctctcattcgcttgatgcggttctctctccacacacacactcacgcgctctcatttgcctgattccgttctctccctccacacacagactcacgcgctctcattcgcttgattccattctctccctccacacacactcatgcgctgtcattcgcttgattccgttctctctccacacacactcacgctctcattcgcttgattccgttctctctccctccacacacactcacgttctcattcgcgtgattccgttctctctccacacagactcatgcactctcattcgcctgattccattctctctctccacacacactcacacgctgtcattcgcttgattccgttctctctccacacacactcacgctctcattcgcttgattccgttctctctccacacacactcacgctctcattcgcttgattccgttctctctctccacacacactcacgcgctctcattcgcttgattccgttctctccctccacacacactcgtgttctcattcgcttgattccattctctccctccacacacactcacgcgctgtcattcgcttgattccattctctctctccacacacactcacgcgctctcattcgcttgattctgttctctctctccacacacactcacgcgctgtcattcgcttgattccgttctctctccacacacactcacgctctcattcgcttgattccgttctctctctctccacacacactcacgcgctctcattcgcttgattccgttctctccctccacacacactcgcgttctcattcgcttgattccattctctccctccacacacactcgcgttctcattcgcttgattccattctctccctccacacacactcacgcgctgtcattcgcttgattccgttctctctctccacacacactcgtgttctcattcgcctgattccgttctctctctccacacacactcgtgttctcattcgcttgattccgttctctctccacacacacgcgctctcattcgcttgattccgttctctctctccacacacactcgtgttctcattcgcctgattccgttctctctctccacacacactcgtgttctcattcgcttgattccgttctctctctccacacacacgcgctctcattcgcttgattccgttctctctctccacacacactcgtgttctcattcgcctgattccgttctctctctccacacacactcgtgttctcattcgcctgattccgttctctctctccacacacactcgtgttctcattcgcttgattccgttctctctctccacacacacgcgctctcattcgcttgattccgttctctctctccacacacactcgtgttctcattcgcctgattccgttctctctccacacacactcgtgttctcattcgcttgattccgttctctctctccacacacatgcgctctcatttgcttgattccgttctctctccacacacactcacgcgctctcattcgcttgactctgttctctctctccacacacactcacgctctcattcgcttgattccgttctctctctccacacacactcgcgccctcattcgcttgattccattctctctctccacacacactcacatgctctcatttgcttgattctgttctctctctacacacactcacgcgctctcatttgcttgattccgttctctccctcgacacacactcgctctcattcgcttgattccgttctctctctccacacactcacgcgctctcattcgcttgactctgttctctctctccacacacactcgcgctctcatttgcttgattccgttctctctctccacacacactcacgcgctctcattcgcttgattccgttctctctccacacacactcgtgctctcattggcttgattccgttctctctccacacacacacttgcgctcttattcgcttgattccgttctctctctccacacactcacgcgctgtcattcgcttgactccgttctctctccacacacacactcacgtgctctcattcgcttgattccgttctctctctccacacacactcgcgttctcattcgcttgattccgttctctctccacacacacactcgcgctctcattcgcttgattccgttctctctctccacacacactcacgctttcattcgcttgattccattctctctctctccacacacacactcacgctcccccgtgtactgcagttggccctcactagccatgggttcctgcagctgtggatttcactagctgtaggttgaaaatatttggggaaaagatttgtgttcttatctgtactgaacacatgcagattttttgggccagttttcccgaagcaatgccatgcgacagccattgcctgcggcgacatcacgtttgcgtttgtaggaacctatggtgatttatggtttggcaggacgcgggtgggttctaggcagacactgcaccagtttacgtcagggacatgagcaagggggtcctggcagccctcccctgcgggtgccaagggtggccatgtgtgcgtttgtgtatttacatgcacacgtatgtaaatcacaggctgcgttctcaggggactgggggcacggccccggtgggtggacaccgtgccctttgaccccaaacatttcactgggtgtctcctgagaacatagtttatatgcccacagctcagtgttcaagggttttctggtcaggcacatgtgtcaccttcggctgattttctcagaggttcatagaaactgcatcccagacacgtctcgcagccccctccgctatcacgtctgcctcccgctgtcctgcagctgcccggaccctgcccctccctgtccctctccttgccctggcccttccatgtcctcggtgaccctggctccggtagggtcagggtgggattgtggcccaggaggtgccggaaggatccatgtactttggggagcctgtggccctgccggctgaacccccactgtacctctcccgtcctcgcacacccctgccctccaccaaccccagcccgctcacgttcttcccagggaaatgggtggtggccctggcctgcctggctgaggtgatgcctcctctgtccccacagcctatggcgttggcctccttgtgacattcgtggcactggccctgatgcagcgtggccagcccgctctcctctacctggtgccctgcacgctggtgacgagctgcgctgtggcgctctggcgccgggagctgggcgtgttctggacgggcagcggctttgcggtgaataccagtttgctctgactgtgagaaatactcgcctagtgagccctaactagagttaaagttgagtgagacctccagccacagccagccctgcggccgcgacggggctcagggtcctggtaccttctgctttgggtgtcatgcgcgtgaggccccggtggaaggacgtgcgtgcagctcctgtgccgggtgggatgcgggggtgccaggtggggcccgggggtgccgggtgggacgcgggggtgccgggtggggcccaggggtgccgggtgggacgcgggggtgccggctgggactcgggggtgccatgtcctttctaaagttgcttctcccaaatagtagtgccccacctgcgtgggcatcgggcatccatcgcctctcctgccgagagcgaggcgcctgactgggggtggggccgcagggccctggacgaggggagcaggcctgccctggctgtggaagccctgtcccctgtcccccttggcaaggcagggggtggttggcaagggttaaacgtgagatgcagggagggcttacgccacgtcggttctgctcttgtgattttttgtgaacaggagtgggtgggacccccccttccagtgtgccgctcaggtgacttcctgggttcccgggactcaggcgcattgcgcccgagagctgcccccgcccctccgggcagcgcctcttggagtccatgaccgcccagggagcagccctgcgccatagggcgatcctcaggctgttgggcatgggtgcagctcctcccatagctgatctccctctgggggagatgccgcgcttctcagcggtgctggccgcgcatggggtcctacgtcatgtttttgtggaggttaaaccacacccgtccctgccgcactggtgtgatgcattgggtcgagctgtggttccagtgccgagctgggctcatgggtcccacagatgggaccatggcctgagaccaggccccagggagaagtctcctggggccagcacccccaccccaaaggtctccccattctgatgggcatttcagaaggttcaggagaagccggggaccaggcccaggggcgagagacggtagtccaggcttttctttggagaggctttgcacagctcccagcctctgctggcctcggatggccctcccgcggcacctgtgccgatggacagggtcctgggtgcccgtaggttatggagccggccccctccttgggtccagagcccctggggatggcgcctcattttgaccctgcccccgtggcctgcgggtgctgggtgtcctggcccctgccagggtcctcctctgggtccctgtctccgcctcacctctgcctcccttctcctgtagaaagtcctacctccatctccgtgggccccagcaccagccgacggcccgcagcctcccaaagactctgccacgccactctccccgcagccgcccagcgaagaaccagccacatccccctggcctgctgagcagtccccaaaatcacgcacgtccgaggagatgggggctggagcccccatgcgggagcctgggagcccagctgaatccgagggccgggaccaggcccagccgtccccggtaacccagcctggcgcctcggcctaggggaggggtgagacgctcgctgccgtgcccgccacaccaagatgttggggctgcctggcgcccactggagacagacagacagacgcctgtcccccgggaccgaggcctgtgccgtccccacccgccccaacatggtgctcatccttgccgagacccctgcggtctgtgcccgcgcccagcccagctgccccggctgcacgcctgctgctcccagctcgcccggctgccacaagctctctgcgggtccatcctccccaccggggtccgtcctcgcaggccctgcccggcctctctgcagaccctcaagcgtcgtctgcatgagtgagcaggcgtgggtggactctggccgcggccacacttggtgctcaccagctgcttcggccttcaggtgacctccctccccacggcatcctgctctccgggtggaagagcagctttctgtctcccagaaggcatcgcttttccctcttgagcagatcggagcccctgggaggtttggaagctgcctccaagcctaggacacggaccagtggccggggcggcctctggcccctgacgctggctgagacaggcccgtggggcggggttttggggcgtgaacaaggctggcagtaagtggacaagctgctcccctggctaaggccctgccctgccctcagccagaggtgcctggccatgcctgcacactcctccccattttaataaatggtcgcaacttctagaagtcctgctggtgccacctggtggggtggacgtctctcagactgcccttctgacaagcaggggtgggcgccaggcaggctgggtcaggccctcaggggtccctggagccctgggagggagggactgggtcgtgggaggtcctggtagctcccggcacccaacctcgcttcccgtgtgggccccgtgttgcttttctgctgagaggggcttgggcctcggttctccctgtggcagcggcattggtgcctgggttcttaaccctctggacccagcagctaggagcttctggaacccacgaggacatctgccactggcatggtctactcactgatggggtcctcctgactccagggcagagacgtccgtgcgggaactgaccgaggcgtggccccaggccccggcatcctcccctcgctgcacgtggtcacttccgaagcagcgctccctgtggccgcagagacagagcccgcaccctggctgtctgtggtgcctgggccccagctcccgcccgccacccgccctgttgagtgcggcctccagactcgagtccagaatctgtttctgtcaagtcagtcgtccccagctgcacacggggactgctgagcgctgcgctctcacgggtctgttccggacagagggtggcaggggtgagccctgatcccttacaaaaaataccagcttcccagggagtaatggcgccttcactgaagccattttgtacatggggacggggtggggacgtctcttttttggtgttggacgtttgaccagtggggaggggttcagaggcggcggtcctgtccttggctccgtctgtccgtgtggccttgctgccattccgtctgatcattaaacacagcttttgatacatatggcccggcctctgcctccgcagtgcacggcttggggcatctgctctgtgcaggtcccggtgagcagaactgagagctggcaggccgcctggctgtcctgcagaggacggattggaattgccaccgcagggccggccagtgctgtgaggtgcccagcgtcactcccatgggctctgtgggccatgtggtccctgtcacgcttctcagctctgccactgttgctggaaagcatcacagaccatgtgtaaaatgggccaaaataccttttacaaaattaaaatagagatggggtcttgcagtgttgctgaggctgatctcgaactgctgagctcagacaatcctcctgtctcggcctcccaaagcgctgcaattacaggcacgagccaccacgcccatccctcaagtaattttctcgccagaccctgaaattggaattgtatagcatcctcacgtctcaaaagagtttattattatttttttctctttaaaaatgcaaagacctgtcttagccgctttgggacaaggtttggtttccagctgctgctggctggcgctgggcctgtgggcacgtgggtgatggatgcgggtttgtgtgcgggccgagaggccagtgagtcctgagcatctgccaggcatcaggggctgctgtgtgtgttgttctagtctcacaaagttctccgctacgttagagaaagtgagacccaggctgggcatggtggctcacgcctgtaaccccagtgctttgggaggctgaggtgggaggattgcttgagcctgggagtttaagaccagcctgggcaacgtagcaagaccccatttctacacaaattacctgggtgtggtggcacacacctgtagtcccagctgttcaggaggctggggtgggagaattacttgagcccaggaggtcaaggctgcagtgaactgtgatcgcaccactgcactccagcctgggtaacagagcgagaccttgtctccaaaaaaaaaaaaggccaccagcaagcctctgaggccacatggctgtgagggatcagagacatggattcctccaggccctgagccaaaccacgactgcctggcagcgtgacgcccttggccttaatgtggaacagggtgaggacgcagcgggagatggaggctcaggccttaccactcacagcaaacctgaattcaaacccactggggaagggacggcttaatcacggaaagcgaattccagaatacttgaagtcacacttaggtttcggttttttaacttgagcagttcctcgatacgctccagaaggagcacccccaattgcctttccacgggggagctcactgctcggaggccactcggcgctggctctgaacacctcccctgtgtgcctctagtggtgatttgtcctgtccaggaaaagaaaaagtcgctatgtcattagctccggtggacctgagcctcagggctgaaagttacagtcaggactcagcgcacagagccctgggctcacaccacgtccacctgtgaccacctgcggtcgtgggcaagtccctctgcctccaactccctgtcctctggaaagagggttagtaatgtacctactgcaaggcacgacagccaggatgtcaccaaatcagccatctgattggacgcttagaagcagtcgggacttttgtgctagtgacacacttgattcaggaagacgggctcctgccaggctcagccggtgcctgagctccggggggtgtgcacacctcgactgtccaggtcacacacggtccagggatgtcagggagaggtagagctggggaaatggaaacaggctgcttgttggcactggggagggtattttgtttcttttcgtggggagcatccctctgtcttgcagtttaagttacaaagtggagcaatatggtaacaatagtgattttctttcactaagctgaccagagcttacacattttttatccacccacctatccatccatttatccaactggccatccacccatccatccatccacccacccacccatttatgtaaccatccatccatccgtccgtccgtctgtccatccatccatccgtccatgcatccatccacccacccacccacccatttatgcaaccatctgtccacacatttatccatctgttcatccacacacccacccattcacccacctgtctgttcagttatccatccgtccatacacataccctccatccactcatttatccaaccatctatccacacacccatccacccatttatccacccattcatccacccattcacctatccacccactcatccatttatctacccatccatccactcattcatctatccacccatccatttatccaacatccatccacacacccatccatctatccgtccatccacccgcccacccacccacccatccacacacctatccatttatccaaccatccatccacctatccacatacccatccacccagttatccaaccacccatccacttatccacatatccatccatccagccacccatccacacacccatccacctacttatccacccatccgtctccatccattgatccaccatccatttgtccatccatttacccattcacacatctattcatccatccatccatccatccatccatccatccatccatccatccatccatctacacacccaaccatccactcacccacacacccacccatccacacacccattcatccatctatccatccatccatccatccatccatccatccatccatccattcatccatccattcaaccacccactcacccatctatccacccatccacccatctacccattcattcatccacccacccacccatttatccatccatccacctatccacccacccaccaatccatccatccatctacctgcccatctagccattcatccatctacccacccctccactcatccatccatttgcccatccatccacccattatttacccctccacccatccatccatctgcccacccacccatccatccatctacccacccacccatccatccatttgcccttccattcaaccatccatccacccaccttccacccacccacccactcatccatttacccatctatccacctgtctactcacccacccatccatccatccatccacccatccactcatccattcatccacccactcacccacccatccacacacacacccatctatccatttatccacacacacacccatctatccatttatccacacacacacccatctatccattcacccatttaccgtccgtctgtccatccatccatccatccctccatccacccaaccacccatccacccatccacacacactcatccacccaccactcttcactgctgtgtgccaggtcctctactaagcaccccgtctggcccaggcagagagctgctatagctgcacgaggaaccgggactcagtgtttggggccaggtgggaagtcatcagaaggtgagagggtggagttctggaaagagtccaccaatggccctgaggaagagaggagggggttcccatggggtcacaggctcttctccacacggctcagagcaggttagaaatgcctcttgggaaccaaccgcagcctgcagcctgacaggagggtgggcagaagaatgcagcaataggaggccctgggtgtggagccccagcttgaatcccaggagctggatgactggctctcagggctgtagccacttcttctgcttaaaaggaggtgacagctacttttgtgaggccatcatgagaacctaggggagtccctgccgagtgccgggcacacagcacatactcagtagactggaccattctgcgggcgactggggaaacgtggacccaggagctggatcctccaggactgctctccctccagcaccaggcgtggctccccgggacttgcggcacttctcaaaagcaaatcaccaacaaagacgctctgccaaaggtaataaaatggggctggtctctaaaggcagttccaaaaaaaatttccgcaaagtctcttgagataagagaggagacagtggttctaacgaagtgcaccgtctccttcgacggcacggaggaacgtgaacaacctggtgacctaagcaggaggggcggccagcgtggcagcgggtggcgcgtcaaaactgaggccacccagtctgaccatgagggagaaaagcaccagacaaacccacttgaggcgtgtcctgcaaaacacctgacctgccttccccaggagcgggcagggtgtcagaaataggaatgtctgggaaactgcgacagcccagagagatccgaggaggcgtgacgcctaaatgccacgtgggatctcgggtggggccctgagcaggaaagggcattgggggaaactgaggaaactggaatcaagtgtggacttcacagtcgtgcatcaatagttgttcattggttgtgacaaatgtatcacactggcctggatgccagtaacaggggacccgggatgtggcgcacaggggagttctgaactgtctttgcacattttgtgggaatctaaaactcttctaaaacgtttaggctgggcacgttgctgactcctgtaatcccagcgctttgggaggtcgaggtgggaggatggcttgagcccaggagttcgagaccagcctgggcaacatggcaagaccccatctctatttttttaaaaaattaaaaatttatattaaaaatactgtagttccttcccgggcaacatggtgagacccccatctctactaaaaatacaaaaattagcctggtgtggtggcaggcggctgtagtctcagctactccagactctgaggtgggaggatcacctgagcccgggaggtcaaggctgcagtgagctaagatcgcgccactgcaatccagcctgggcgacagagaatgagaccctgtctcaaaacacacacacacacacacacacacacacacacacaaaatggttacaccagtgccctagaaaacgccctcagcacctcgcccccagggctgtcctgggcacacccctccctgcgccctgtcctgagtcacctgcccaggtgggcccacctgcccacagcgcccactctgcgggcaacccccaccccatggctcccagctgcgaagcccactcccatccctggctacccccaacccctccccatctccatcgtcttccactctgggttggctcccgccagggttgggaatccagggtggaggtggcagagccctgggacccctgtcctccggagactccaagcctgggcggcacccccggcccggagcaggaggtactggggaaggggcttggcagggggccgggggaggggcggctcccccacccggccccgccccgcccctcccttcctccagccccgggcccagctccggcttctgctccacttcggggtgggcgggatccgggcagtagcggtgcagcctcgtcgtccggagcgcggtgagtcggggtctcctgcgggctcagcctcccctcggaacagcccccacttcctccaaccccggtgagtcggggtctcctgcgggctcagcctcccctcggaacagcccccacttcctccaaccccattcgccaagccccggggctgtttggttgcctctggggctgtgtagaggtggcgtggcgggagtgtgtagatgcagccaggctgtgtagacaccaccggggttgtggagaggcagccggggctgtgtggacgccactggggtgtgtagacatggccaggttgtgtagatgcggccagggttgtgtggactcaggtgccgcgtgtagatgtggccggggttgtgtggacgcaggtgcggcgtgtagatgcggcaggggttgtgtggacgcaggtgtggtgtgtagatgcggcgggggttatgtggacgcaggtgtggcgtgtggatgcggccggggttgtgtggactcaggtgtggtgtgtagatgcacgtagggttgtgtggacgcagccgggattgtgtggatgtatctagcgtgtgtagatgtggctgagatttctagacgaggccaggctgggtagatgccgccagggtgtgtggacgtagccgggattgtgtggatgcagctgagatgtgtagatacagctggggtgtgtagattcggcctagttcctggaggggcctgggaccgccgaagccctccccatccctgttcccacccagagtcctcccttcttttctacccgtgaacttcacctaaagcaagaaccaagcatcagcctggagccctctggggtcaggggtggcgggaaaggggctgacagctactgggatggggtgcagggctggggtgggaggtgagtctggggtgtggtgcggggctggggtgggaggctggggtgggaggtggggctggggtgggaggctggggtgggaggtggggctggggtagggtgcagggttgggatggggtggggtgctgggatgggttggtggggtgcagggctgggatgggttggtggggtggggtgcggggctgggatggggtgggaggtgagtctggggtgggagggggggctggggtgggaggcggggctggagtgggtgccaggcatctgactggagcctctcctcccgccccagttctcaccctcggagccgcttctgagtaaacacacactgggatgtaacaattggaggtgggtgaagggcctgagatggggtgggttgttggtatttgcctgagggagggtcctcctggattcaattagccccggcaggaaacccaggctggggaccgtggcgttatccccgcatgaccgggaatgacccacattctgggaattagggcggggtccccaggacaggcgtccgtgctcgagggtcctctgtggcccagggaccttcgacttccttccgtcattttatagggggtcaaaccaggcctcggacccaggcatgggctccagaggttgccagaggttttggggacttgccaaagggttcaggcactgccccgcaggactgcatggccggaaacaccttgtgggccgcgtggtggccaccgccttgcagatcagggatgccccgcaggacacctgtggtcctggcttcctgacgccttcctgggggcctggctgggtggggctgtgtgagattctgggtgagttgtctgtgtggctgtgtgtgattgtgtgtgatcatgtgattgtgtgtgatgtgtggttgtgtgtggcaatatatataattgtgtctgtagctgcatatggccatgtgatttgtgtgtgattgtgtattatatgtgtgtgtggggtcatgagtgatcgtttatgttgtgtaattgtgtgattgtgtatggttgtgtgtggtcatgtgtcatgtcatgcgtgattgtgtatggttgtgtaattgtgtggtcgggtgggatcgtatatggttgtgtgtcgatggctgtataactgtgtgtatagttgtgtggtcatgtgtggttgcgtatagttatgtcatgatgtttgtgtgattgtataggattgtgtgtggttgtgcgagattgtgtgactgtgcagccatgtgtgtcattgtgcctgtgattgtggtggaggtgtaattgtgtgtatgggtgtgtgactgcatgtgtgagaccgtgtatggttgtgtgttgtatgggaggtttctgcagctgtgtggttatagtgtacggttgtgtgtgtgattgcatgatgagaattgcatgattttgtggatggctttgtgtggttgtgtatggttgtataattgtgtttgtgtgtgattgcatatgattgtggcaatatgtgtaatcgtgtctgtatgactgtgtatggtggagttgtgattgtatcagtgtatgactatatgtgtgaagttgtgtttagctgtatggtcattgtatgtgagatttgtggagttgtaacgtggttgtgtgtgtacttgcatgatgagattgtgtataatttgtggatggtggagtgaggttgtgtgtggttgtatgtggttgtgtgaggtgtgttttgtgagggtgtgtgtggttgtggtgtgtggttgtgtgaggttgtaatgtgtggttgtgtttggttgtgtgaggttgtgtgtggtaatgtgttgtgtgtggttgtgtgttgtgtgtgtgttgtgtgaggttgtggttgtgtgtgcaaatcccctcttcctagtcttctcatctggggcatggggatcagggtcccagcgctcaggctggcctgaccgtggggtaattgggccctgcagagcctcacgccgcctgcttgtcctgccacgcggaatgggagtccgtgtgtgccccgctgcccacagcgtgtgaacgtgagttggggaccatgtggcccactgcgcgctgggtcccgtccctaaagagcattcttggactgtctaaaattccctttgcagaatttggaatgtttagggtgtaaaatacggagcttggagagtccttaggcaaaaggtgttggtggccggttgcccaggctggggactctgtccgcggggcgagagcttgcaggaacgctggagcatcggagttcaaaccctgttgtcactgtggttggttaagggctttgcggagacgtggaggcatggtagatggatcgcaggtgagggcggaatgaaggcaaaggcgtcccttctctgatggcagacacatgggtggagatttgaggtaggagcagttgtgggggggtggggggacaggcgagagtgtgggagggagtgaggtcgcgtgattccccgtgcatctgtgcgtgcaactgtgggtgatggagctggtgcttggggaggcaggactggaccctgggtgccgacactggggcagggtttagagctcccggccctgcgcccctcggtcccccaggctcacctggcttagctggggagcagggttctcggggagcataacagggaagctgcccagcaatgtggaggagtcactagaattccaagaactctgtgtgtgagtgtgtgtgtgtgtgcgtgcgcgcgtgtgtgtgtgagagagagagagagagtgagagtgggagggagggagggagggagaggcagagagagccttaatctcctcctctgtaaatgggcatgctgatattagctggacctgtctcctgtataccctgggattattgggagggctggatcaactctcataagcctatgagccctacaccaacaggacgctgttggtataagcacatctcagcctcccggtagtcctgtagacccagcacctgtagtcccagctactcaggaggctgagatgggaggatcgcttgagcccgggagttggaggctgcagtgaactgtgatcacaccactgcactccagcctgggtgacggagtgagaccctgtctcaaataaataagtgaatgaatgaatgaatgaatgaatgaaagacgcataaatagaagaaatttagaagcccaagaatgaagctgaggcgaaccttggggttttattgaagttgatggttgacgcagccctgcaggctgttctaagccattgatgtttctgtgtgttgctctgaaatggatgcagaggataacatattctgggtgatccactcataactgcataaggcttcctttgttgttgttgttttgcagagatgggatctcactatgttgatcaggctggtcttgaattcctgggctcaaggaatcctcccaccttggcctcccaaagtgctgagattacaggcgggagccacggcacccagccctttgttgttttgtttacactttacctttatgaaaaaaaaaattgggggggataattttagttgtgaagatggtgcagagagtccccgcacacccaccttccacccagtgtccccttgcgttgacacctttgaccacagaacaaagagcaaaactgggccgggaacggtggctcacgcctgtaatcccagcactttgggaggctgaggcgggccgatcatgaggtcaggagatcgagaccatcctggctaacacgctgaaaccccatctctactaaaaatacaaaaaaaattagccgggcctggtggcgggcgcctgtaatctcgggaggctgaagcaggagaatggcgtgaacccgggaggcagagcttgcagtgagccaggatcgcgccactgcactccagcctgggcgacggagcgagactccatctcaaaaaaaaaaaaaagagcaaaactgacgcacgactgtgggtgccacactctgtcttcccaccaatatttctgttctacgttgcaatccaggatcccacattgcatttaggagctgtattaattttaaatgatacaactcataagtgattggaaggttattttttaatctctgcgttttcctctgggtcccttagtatcactcatgtttatcggcgtcttccctcccacacgattactgactcctttctcctctgtccacattataaagctaaaagaacacaagataccattgctgcaaatagttttctcacaaacacctcttcccatgaaagcctaacaaaaagaccatagacaaaatgaaaaaaaaaaggagaccaagcttattaaatttcctgtaggcttgctgagtgatttatttcatgatgttggggcgatggaggaggggaggatttcctgactagattcaggcctgaggacaggggacaggaagaaataagagaggccatggcgtagacaacagctgtctgttctataaacgggctttggctgccgtgggaccaaagatgcggaatcgaatgggatggacgtgtccgaaaactgtgatcatcttggattaggtgaaggaaaaaacaaacaaacaaacaaaaaaaacaaaaaaactacacagacaggtgggcaagacagctaaagagcccagaccgaggctgggggcatgatggtgcaggcttgtagtcccagctatttgggaggctgaggcaggaggatcacttgagcacaggaagttgagaccagctgggcaacatagcaagaccccatctgtacaaaaactaaaaaaatgagccaggcatggtggtgtgcacccatagccccaactatttaggaagctgaggtgggaggattgcttcaacccaggagttggaggctgcagtgagctgtgataacaccactgcactccagcctgggtgatagagtgagattctgtctcaaaataaataaataaataattttaaaaaagagatggagaaagagaagagaagaaatttagaagctcaagaatgaagctgaggtgaacctttgggttttattgaaactgcttggaaaaaaagggaaccccctgaatttctccttggagaggttgaaccatggttttgagcaactagaaaacattggccattaaaagcagagagtgagaccctgtctctaccaaaaatttaaaaaattagccgggtgtggtggtgcacacctgtagtcctagctactcaggcggccgaggtgggaggattgcttgagtccaggaggttgaggcttcagtgagctgtgatagcatcagtgcactccagcctgggtgacagagtgaaaccctatctcaaaaaccaaaaaagtaaataaggaacaccagacagaagagccctgggacctgccgtcctgtgtattagtttttggttactgcataacaaatgtctctcaaatttagccaattaaaacaacagacatttattctgtcacagtttctgtgggccaaggatttgggagtgatttatctgggtggttctggcccatggtctctcatgaggttgcagttaagacatgggccaggggctgggtgcggtggctcacgcctgtaatcccagcactttgggaggctgaggagggcagatcacaaggtcaggagatcaagaccatcctggctaacacgatgaaaccccacctctactaaaaatacaaaaaattagccgggcgtggtggcgggcacctgtagtcccagctactcaggaggcggaggcaggagaatggcgtgaacccaggaggtggagcttgcagtgagccaagattgcgccactgcactccagcctgggcgacagagcgagactccatttcaaaaaaaaaaaaaaaaaaaagacatgggccagggctgcctcatctgaaagctcgtctgggcctggaagagccacttcaaagctggtgtcctcatgtggctgttggtgggaggcctcagttcctcaccacatgggaatcaccatagtgctgctcgagcatcctgacaacatggctgcttgcttcccccagggctggtgattcaagggagagaaagaacaaagccatagtgcttctatgatctaacctcagaagcctagatccattgcttctggtatattctattcattacaagtgagtcaataagtccaacacacactcggagagggaaattaggctctgctaggtgaggatagcaaataatttttggagatatttaaaaaccaccacatctataaccttgggcaagttacctaactcttcggtgcctccaattcatctttggtcagaatagaaccagtctcataggagaaatgtggcaataaatgagatgatgactgtaaatattgtttaatacaacacctgtcacatagaaaatgcttatgtacttttttttttcaagatggagtcttgctccattgcccaggctggagtgcagtggtggaaacttggctccctgcaacctctgcctcctgggttcaagtgattctcctgcctcagcctcccaagtagctgggattacaggtgtgcaccaccatgactggctaattttttttttttttttttttgagagggagtcttgctccgtcgcccaggctagaattcagtggcacgatctcagctcactgcaagttctgcctcccgggttgacaccattctcctgcctcagcctcccaagtagctgggactacagtcacctgccaccatgcctggctaattttttgtatttttagtagagatggggtttcactgtgttagccaggctggtcttgaactcttgacctcaggtgatccacccaccttggcctcccaaagtgctgggattacaggcatgagccactgcacccagcccatgactggctaatttttgtatttttagtagagacagggttttaccatgttggccaggctggtctcgaactctggatctcaagtgatccacctgcctcagcttcccaaaatgttgggattataggcatgagccaccatgcctggctttatccacttacttttattaaaggtatatttttcagtgttacagctcttgaggaatgatgtgccagctatagttatcaaattgtaactctctggatttgtggggccggagaggcagagggaaataacttgctctttcaggaggcattaggctacggaacggagagactgcacatggcggctgcgtttttcctggctccccttttccaatggttaagggaagacaaatgggaattaagcagttccaggctctgcatgtggcagaaaccatcctaccatctactcccatgggtgcagtttgcaaaatttgagagaccaaaaaaaaaaaaaaagcagagaatgtgaagggcacattagggtatagctgaggatgtcaggcaggagacacagcctgtgcctttgaaggcactgaggctggaccatgctgtgcatgtttggggatcggcgaggaggccagtgaagctggggctgaaggagggaggggttggagatgaggacagttagacccggtcgctgtggggaggtttgggcagaggtgggatgtcacctgacgcgggtcttagctgtctccctgaggcttcccgttgagaatagacccagggaggggaagatggaagtggcattttgtgagcctgggcgatgccctgcttagaccaggctagacatggcgtaggggcccaattctagagctaccctgcagacggtctgacaacgtttttggatggactgggtttgggatgtgccagggcatcaaggataaacccagtttttttttttttttttttttttttttaaagacagagtctcactctgtcgcccaggctggagcacagtggcgcaatctcagctcactgcaacctccgcctcctgggctcaagcaattctcctgcctcagcctcctgagtagctgggattacaggtgtacgccaccatgcccggctaattcttttttttttttttgagacagagttttgctctcattgtccaggctgtagtgcaaaggtgtgatctcggctcactgtaacctccacctcccgggttcaagtgattctcctgcctcagcctccagagtaactgggattacaggcgcccaccaccacacccagctaattttgtatttttagtacagatggggtttcaccatgttggccatgctggtctcaaactcctgacttcaggtgatccacccatctcccaaagtgatgggattacaggcgtgagccactgtgcccggccaaacccaggttttaaaaaaaatttttttgtacctgggtgagtacgaaagtggagctgctgtctgagctgagaagactgtgggaggagcaggcatttttgtgaagaggagactgaggagggatatgagagctcagtttggtcagtgtcaaatttaagaagcctgttaatgattgtattagcttttgtttgtttaagacagggtcttgctctgtcaccctcacccaggctgcagtgtagtggcttgatcgcagctcactgcagcctcaacctcctgggctcaagtgatcttcctgcctcagcctcccaagtagctgggactacaggtgtgtgctaccaccctggctaatttgtaattttttttttttttttttttttttagagatgggatctcattatgttgcctacactgatctcaaagtcctgggctcaagcgatcctcctgccacagcctccaaaagtgctgggattacagacctgagccactgcacctggcctagttttctgcaaattaccacaaatgtagcaacttgaaacacctcctgtttactgtctcatggttttgtggtttctgtgggttgggtggctgggcatggtttggctggatcctctgctcagggtctgacaagactgcagtcagagtgttggctgggctgtggtctcatcagaaactcaactggggatgcccaaatgcagtggctcatgcctgtaatcccagcactttgggaggccaaggctggcaggtcacttgaggtcaggagttcaagaccagcctgggcaatatagcgaaaccccttctctactgaaaatacaaaaattagccgggcatgatggcgggcaccagtgtaatcccagctacttgggaggctgaggcaggaaatcacgtgaacccaggaggcagagattgcattgagctgatattgtgccactgcactctagcctgggtgacaagagacttcatttcaaaaaaatatatacacatcctggctaacacggtgaaaccctgtctctactaaaaataacaaaaaaattagccaggcacagtggcgggagcctgtagtcccagatactcaggaggctgaggcaggagaatggtgtgaacctgggaggtggagcttgcagtgagccaagatcacgccactgcactccagcctgggtgatagagtgagactctgtctcaaaaaaaaaaaaaaaaaaaaagtgggtaggttggccagatgtcccaggttgcaggctacaccatgcctggctcattatttttattttttgtggagatgggggtctcgctatgttcctcaggctggtctcaacccctggcctcaagtgatcctccctccttggcctcccaaggtgctgggattacaggcgtgagccaccacgcccagccagaaacttgggtttaaaatggactttgcattataatgagatgggtaattcacccaggatgaatccagccttcagcttttgctttcttttgcttttgctttctctctctgtctctctttatatatatattgcccagactggacaacattgcaagacctcgtctctacaaaaacttaaaaaaaaaattaacccagcgtggtggcatgcatttgtagtcccatctactcgggaggctgaggcaggaggatcccttgagcccaagagttcaaggctgcagtgagccgagatcataacactgtacttcagcctgggtgacagagccagaccctatctcaaaaagaaaaaaatgcatgacaatattatgtatcttgatgaccgaggtttttggaactcactttaatttttctcccagggccaatacctacctcctgtcaccctactccctggccccggatgtcctctgcgaaggctctgagcccacagctcactcctgtttgaaaacagacactggcaggtctcagagtggcattaaggacacgctggccctaaaccaagactctccccagctggcctcatctggaggctggaaacagacattgctattgcctcgttcacagtcgctcactcgttcacagtcactcgtggctctgctaacaaagtccttgcctagtccctccttgggggcccccacacggctccagatggttcctgacagatgaagacggaagtcggtaggttggccagatgtcccaggttccaggttaaaactggaatagctgccgggcgcagcggctcacgcctgtaatcccagcactttgggaggctgaggcaggcggattgcctgagttcaggtgtttgtgactaccctgggtgacacagcaaaaccctgtctctactaaaatacaaaagaaaaaaaaaatttagctggatgtggtgacgggcacctataatctccgctacctgggaggctgaggcaggagaatcggttgaacccaggaggtggaggttgcagcgagccaacatcgtgccactgcactccagcctggcgacagagcaagactccgtctcaaaaacaacaaaaccaagaaaaaaaaaaaacaaaactagaatagccttgagcaaaccagggccaggacaactggtcaccccaaagcaaactgactcactgggtgacagggactctcaccccatcaccaccgcgttgggatgagtcggacttcctgcctcccgcctgggccagaggatgccgagagagtggcgtctgttgggctggaggctggtcgagccacaggctcaatttggagacatcaatgctgatggttcatgattttggtgcgatctcggctcactgcaacctccgtctcccgggttcaagctgggattataggcgcccgccaccatgcccggctaaattttatatttttagtagatgggggccaggctggtctcaaactcttgacctcaagtgatccgcctgccttgacctcccaaagtctgggattacaggcgtgagccactgtgcctggccccttcttttttcttccctgtatcttggtgcgcagttcagatctgagatcccacgtccattcttctcgaagctttttcctgtcacgcaggcgggcgagtctcctcctactgatctctttggttttacagctacacacttttctttttggtttgcctgggggcattctcacatatctctcaaacccggccagtaacaccctcctacgttgctttaaaaaaaaaataaatgatgcctcttcttgtcaagggcttcctcccacctcaaggtcacctgtcaacctccatgcccactcttgtttctcgaaatgggctatcttccctccttctacctgtgtatttcattctctcccacccccagtctttggaaaaaaagataataaaactctagaagatatttttactctgagattagcagtgtgaaggaccttccagaaccttctctctctgcctttctctgaattaaaacgctcgcttgtctgagaccggctgtctccattgcatctgagtgataagagaaagattcattgaaacaggcaggttttatttttggtctgtccagcactaaatgattttcttttggctgacttatttttttttaactctaaacagactttgcagcttagtaagaatttatttcaatttagaaatatgggtgttctaaactttttttaaattaaaaaaatttattttttcctgagacaaagtcttgctctatcacccatgctggagtgcagtggcacaatcatagttcacttcagccttgacctcgtggggacaagtgatcttcctgcctcagcctccaaagtagctggaaccacaggcgtgcaccaccacccctggctaattatttttattttttgtggagatgggggtctcgccatgttgctcaggctggtctcaacccctggcctcaagtgatcctccctccttggcctcccaaggtgctgggattacaggcatgagccactgcgcccagccagaaacttgggtttaaaatggactttgcattataatgagatgggtaattcacccaggatgaatccagccttcagcttttgctttctttttttatttttatatatttattgatttttgagacacagtctcactctgtcgcccaggccggagtgcaatggagcaatctgggctcacttcaacctctgcctcccgggttcaagtgattctcatgcctcagcctcccaagtagctgggattacaggcacgccaccacacttggctaattttttgtatttttagtagagatagggttttgtgatgttggccaggctggtctcaaacgcctggcctcaagggatcctcccactttggcctcccaaagtgctgggattacaggcgtgtaccaccatgcccagctaatttttgcatttttagtagagacggggtttcgccgtgttggccagggtggtctcgaactcctgacctcaggtgatccacccacctcggcctcccaaagtgctgggattacaggcatgcaccaccatgcccagctaatattcgtatttttagtagagacggggtttcgccatgttggccaggctggtctcgaactcctggcctcaagcgatccacccgcctcagcctcttaaggcgctgggattacaggcatgagccacagtgcccggccaacttttgctttctttgccgtacacgtggcctagggaggttgcagcttggaggttttcagccaactttttgcgaaactaatacacaccatgctgatttattctttaggaaacttgtcagcttttcactgaagcaacaaatgcttttgtctgtaccaactatttgcaaagtgctttacagggagatctgagcaaggcagagaggtaaagaaggctcgtgtctatccttgaggagttgagaggagtctagaagtttctgtacattgggcaaatctgggcagtgctttataacattttcccgagctacagagctctgacccctccgcggcttcactgcttttcaagctattacatcagcaccaaagattcctttttcttgtattcacggtgacaaggagaggctcaaagtcctgcctgtccattaatttcatgctgatttctctcaacaatctttttttttttttttttttttttttttttttttttttaaagaggtagggcgcggtggctcacgcctgtaatccccgcactttgggaggccgaggccggtggatcacctgaggtcaggagttcgagaccaccctgaccaatatggtgaaaccccgtctctactaaaaaatacaaaaattagctgggtgtggtggtgggcgcctgtagtcccagctacttgggagactgaggctagaggattgcttgaacctgggaggcggaggttgcagtgagccgagatcgcgccactgcactccagcctggagacagagcgagactccgtctcaaaaaaagaaaaaaaagaaaacaaaaacacccctcaaaaacagggtctttgtttgagaccctgttggaggcctctgcgttgctctggttgtctctggggagcccctaaccaggcttggaagaggttcttggaggaaggtttctcctctgaccaccggctggctctggccccttacccacgagcctctgtggccttggtgaggtgggcgccgagtgcatacggtggataagcctgatgttgtgttgattgtattgtgttcttctccagacagcagcaaaggaggggaagagcgtttcctttagggaccatccctgtagaagttcctgctctccgcttcggtttgttcacaaactacatatcctggcaccagggggcacagaacttggctccacgacgaaacaggtcccgtggaggagctggtgctgggcggggctgcgcctgactcactctggtgtctgctgaggtccttccctggtggagactcctgcctccaactctatccccttttggtctcttcctccacggcactgacctcatcctttccttctgttggccaccaagatggaggccaatggccccacgtctacacgtggcagtttaggagccccactgggaagaaggcgtctccgtccctgcttctgtgagttgaaccataagaaactgatcttgttctatagactttggtcttaaaaagtgacagttttataaagttgaaactcaaggatccaaaagaacttggtgtcctgcttgggtcatatgcaacctcttgggtccatcactgatggggatggaggggtgggccctgtgattgctaggtcagggtctagtgtggaccaatcactgatggggatggaggggtaggcactgtgattgccaggtcagggtccagtgcggaccaatcactgatgggggatggaggggtgggaactgtgattggcaggccagggtccagtgtggaccaatcactgatggggatggaggggtgggaactgtgattggcaggccagggtccagtgtggaccaatcactggctggagatggaagggtggaagctgtgattggcaggcttgtgttcagtatggaccaatcatcactgatggggagagggagtaaacactgtgattggcagacctggtggctagcaccatgatcgaccaccccaccaggacagcagggatgaggtggaccttcattgaagaaagggatgctgggcagacaaaaaacacataccctagaaaattacaactgaagggacaaagcagatcaacgacctggggaaactgaggcctggagaatttcattgccttgctgggactcctggaagtctcaggatgagtgaggatctggatattatgagttgggcagctcccatttgcagggtgttcctcctgtaaagatgccagatgcccagtaaaccattcggctctctccgaagtcagcatcgagtagcattgtccccagggagcgtgtgttggcttcctggtgctgctggaacaagatgggcctccctgggccaaagtcaaggtgtgggcagggctggtccctcctgggggctccaggcgagaatgtgttcccgcctttcccagcgtctagaggcacccacatcccttgctcggggccccttcctctcccttcacagccacagcgcagcacagcctcttccagtctccctgaccctcaccctcccacctcctctcatgagaacactgtggggatatgaggcccgccagatcatcaggattatctcccatctccatgcccttcactcagtcccacttgcagagtcgctttggccatggaaggcaccacatttacagattctggggattaggacctggatgtcagagttattattctgtggccacaggaccgacctgagatgtcatttcttttttttttctttttgagatagagtcttgttctgttgcccaggctgaagtgcagtggcacgaccttggctcactgcaacctctgcctcccaggttcaagcgattcttctgcctcagcctctcgagtagctgggattacaggcatgtgcccccacgcccggctaatttttgtatttttagtagagatggggtttcaccatgttggccaggctgatctcaaactgacctcaaatgatccgctctccttggcctcccaaagtgctgggattacaggcatgagtcgctgtgtccagccccaagatgcatttctaggaacgtacccagagacactgtcagattctctgtaccaaggagtcaaggctctttctgacctttgcttggttcaaaggaagattctgccgcctgatttctgcctgctctccacccggcctgccagctgccaggatgcaatttctctggcctccaaggaaggccaggcagggtcgcgccggggcagaggcacaccagcgcgtgtctggcccagtgtgcccagaacccgagaaactggagtggccacgggtgggcggctccctcacgctggcttctcctgagtccctttctgttcacagatccccactcctggctatccgcatgctggtcatttctgcttggagacagttcaggtgtgtcccacagttgctgtccctggggctcttggctctattgttaatggccaccggctgtgacggctcacatttcagtcctgcatatgtcagttcctcgtactttctttctttttttactgtatgtatgtatgtatgtatgtatgtatgtatgtatgtatgtatgtatatatgtatgtatgtatgtatgtatttgagatggggtctcactgtgttgcccaggctggtctcaacatcatgggctcaagcagtccttctgcctcagcctcccaaagtgctggtattacaggcatgagccaccacacctggtcttcctttctttccttctcccctcccctctcccctctcccctctcctctctcccccccacccctctccccttccccctcccctcaccttcccttcccctctcccctctcccctcccctctcccctctctcccctctcctctcccctctctcccctctcctccccctcccctacccctaccccttcccctacccccctgccctcccctctcccctcccctctcccctccccctccctctctcccttccttccttctttccttccttccttccttctctctctctctctttatttttttctgagacaaggtctcactgtcacccaggctggagtgcagtggtgtgatcataactcactgcagcctcgaccttccaggctcaagtgatcctcctgcctcagcctcctgagtggctgggactacagatatgtgccactatgcctggctaatttttacaatttttttgcagagacagggtctccctctgccacccaggctggcacagtcatagctcactgcagcttcgatctcctgggctcgagtgatgaaccctcccacctcagcctcctgagtagctgagactactggcatgcaccaccatgaaaggtcaatttttaaattttacatttcgtagagatggggtctcactatgttgcccaggctggtctcaaactcctggcctcaagcaattctcttgccttggtttcccaaagtgttggaatgacaggcatgagctgccacacctgaccccccttttccttataaatcacccagtctcaggtatttctttacagcaggacaaaaatagactcagacaactgtgtttaggcattacttatagggtgacaactgtcctggtttgattggaattgagtggtttcctgagacatgagactttcagtgctgaacagggacagtcctgggcaaactgggaccattggtccctgtaagtgttgacgggacactgtgtcagtctgttctcatgctgctaatgaaagcatacccaaggctgggtgcagtggctcatgcctgtaatcccagcactttgggaggccaaggtgagtggatcacaagcccaggagttcaagaccagcctggccaatatggtgaaaccccatctctactaaaaatacaaaaattagccaggcatggtggtgcacacctgtagtcccagctacttgggaggctgaggcagaagaattgcttgaacctgggaggcagaggttgcagtgagccaagattgtgccactgcactccagcctgggggacagagcgagactccgtctaaaaacaaaacctacctgagactaggtaatttataaaagaaaaagagttttaattgactcacagttcagcatggctggggaggcctcaggaaacttacaatcatggcggaaggaggagcaaacatgtccttcttcacatggcggtaggagagagaagaatgaaagcccaacaaaggggaagccccttataaaaccataagatcttgtgagaactcactattatgagaacaggatgggggaaagcatccccatgatttaatgatctccacctagtccctcccatgacacatggggattatgagaactacaattgaagatgagatttgggtggggacacagccaaaccatattagatacctggagggagaagtcaagaatgtaggtggcaaaactttctaaatgtgcttgatgtggaacagctctccagcaacgtgtgtcctaagacaaagcctgagcttctttctcttttttttttttttttttttttgagacagagtcttgctctgtcgcccaggctggagtgcagtggcacaatctcagctcactgcaagctccacctcccaggttcatgccattctcctgcctcagcctcccgagtagctgggactacaggtgcccgccaccacgcctggctaattttttgtatttttagtagagatggggtttcactgtgttagccaggatagtctcaatctcctgacctcgtgttctgcccgcctcggcctcccaaagtgctgggattacaggcatgagccaccgtgcccagcaagcctgagcttctgagtgtggtgcacagcagccttccagatggggctgttgggccttcctgcctcacctctcacagttctcctaccccaccccacactaggccctgacattccctaaactaactttctttctctttctttctttctttctttctttctttctttctttctttctttctttctttctttctttctctttttctttctttccttccttccttcctctctcccttcctctttttctctttctctctctctctctctctcattctctcttttctctctttctttctctctttctttcttttctcttgcccatctcaagtgcagtggcacaatcacacctcactgtagtctcgacctccttggctcactgatcctcagcctcaagagtagctgggactacaggtgcatgctaccatgcccagctactttttctattttttatagagatggggtcttattatgttgcccaagctggtctcgacctcccatagtgctcagcctcccatagtgcctcagcctcccatggtgctgggattacaggcatgagccactgcacctggctggttgtaattaactttagttttaatagccacatggggccagtggctgccattttggaccttgctggtgttgtatgactgtttatgctctcagctcccacttagtgggagaatcatgcagagagtcatgagactgaggcaagaggatcatttgagcccaagaaatcgaggctgcaatgagctacaattgtgccactgcaccctagcctgggtcacagagtgaaaccctgtcttaaaaaaaaacaacaaaaaaaccccacaaaaaaccaggtacagtggctcatgcctgtaatcccaggactttgggaggccaaggtgggtggatcgtttgaggtctggagttcaagaccagcctggccaacatggcaaaaccccgtctctactaaaaataaaaaaaaaaaattagccaggcatggtggcatgcacctgtaatcccagctactggggaagctgaggcagtagaatcacttgaacctgagaggcagaggttgcagtgagccaaagttgtgccactgcactccagcctgggcaacagagcaagactccaccaaaaaaaaaaaaaaagacagtggattcttccccagtcaagcctcagatgagaatgcagcccagctaacacctggattgcagcctcatgagatgctgagcagaaggcccagctaaaccctgtcagaatcctgaccccaggaagtgaggaggtaacaagtgcatgttgtttgaagctgctaagtttgtgctgatttgttacacagcaatagctgactaatacagtttctctacaatagccttgacttccttacttctgccacagggattctagatactttatccctgccatgtaggatccgttccttccactggaggcttactcaattcctatttatccttccgaacttgaataactcatcactctctcagaaaaccctcccctgacggcgtgtctaaatcaaagacccctgtacacagattcaaagtttctggttgtgcttctagttttgagccattcttgtagcatcatgttaatggatctgggcctcttccacttggattgaagctctctgagctcagagaatcgtatctgtctcattcagggttcgacgcagccaggcctggcccatcgtaaaggttggctggatggagagagtgaaatgaatggcgcttctatgtttgatgctaaatagctgtggagttctttctgtgaaccaataatggtgatgacaagaccatttagagaacacaggaatccttagaaaacccgcggggcagggtcagcagaggcagctggggttgaatgaacactgtgtgtgtgtgtgcgtgtgtgtgtgtgtgttggggagtgagctcatactctaaatgtgcctttccagctctaatcacagaagtgaatctcggtgtcttttgtttctaaaccatccatcaagtgattcttggagattctctggctcgtctgaaggcagttcaactcaagcgtaagagtaaatgggaaagtgtggtgcagcttcactccccgctgcccctgcctccccaccgcccctgcctcgctccacgctgcccctgccttgctccatgccgcccctgcctcactccccgccaccctggtacatctctcctttctcattggctctggatggtagcggccaggcatggagtggctgttcccagaggaacacgttcccctgaggagggaacattctggctgggccccagcatagggttgccagactcaacaataaaacatttagcaccctcggagacattagaatttcagatatgtattcattcattcattcattcattcattcatttattttgagacggagtctcgctctgtcgcccaggcttgagtgcagtggcgcaatctcagctcactgcaacctccacctcctgggttcaagagattgacctatcttaggctcccaaatagctgggattacaggcgtgtgccatcacgcccagctaattttgtatttttagtagagacggggtttcactatgttgtcaggctggtctcgaactcctgacctcaggtgatccacttgcctcagcctcccagactgttgggataacaggcatgagccacagcacccagccagaatttcagattaacaaccaaaacgtttcttttttttaaacagggtctcactctgtgttgcccaggctggagtgctcactgcaacctctgcctctgaggttcaagtgattttcctgcctcatcctcccaagaaaccatgtgccaccatgcccggctaatttttttattttggtagagatggggtttcgccatgttggccaggctgttctcaaactcctgacatcaggcgatcctcccaccttggcctcccaaagtgctgggattacaggcgtgagccaccgcgcccggtcaaaacatttttttagtaggagtcggagaatgtcctacattttgcacaagagagacatacttatactaaaatacagattagagacagaattcttcagagaaacaggaccaattgagtggatacacagacatatacgcacagatgcacacacagatgcacatgcacacacacacagacacatgcacacacaaatgcacacgtacacacagaccacacatgcacacatacacacatgcacacgtgcacacatacacacatgcacacatgcacacacaaaagcacacatgcacacagatacatacgcacaaacgcacacatccacacatacacagatgcacacacgcacacacagatgcacacccgcacacagactcacacatgtacacacacacagattgagatttattttagggatttggctcataccattgaggggctgcaggtctggaatctgcagggcaggccagagacctagggaagagctgatgctgcagtctcaagcccaaaggctatctggaggcagatttccttcctcttggggaacctcagtcttttaaggccttcgactgattgggtgaggcccaccacattatggagggtcacctgctttatttaatatctaccgatttaaatgttaattgggcttggcgcagtggctcacgcctgtaatctcagcactttgggaggccgaggcaggtggatcacctgagatcaggagttccacaccagcctggccaacatagcaagatcccgtctctactaaaaatacaaaaattagccaggcatggtggcaggcacctgtaatcccagctacttgggaagctgaggcacaagaattgcttgaacctgggaggcagagtttgcagtgagccaagattgcaccactgcactccagcctgggtgacacagctagattccgtcaaaaaaaaaaaaggagaagttaattgggctgggtgggtgcagtggttctcagcactttgagaggctgaggcaggaagatggcttgaagccagtagttccagaccagcctgggcaacatagcaagaccccgtctctaaaaaaaaaaattacgatttttaaaattttcttagaggcagggtctccctacatgatccaggctggtcttgagctctgggctccagtgatcctcctatctcggcctcccaaggtgctgggattacaggtgtgagccactgcaccctgactctacaaagaaattttttaacttagctggcatagtggtacacatccatattccagctactctggaggctgaggtgggaggatcgcttgagcccaggaggtcgaggctgcagtgagctatgatcacaccactgcactccagcctgggggacagagtgagacccccccatctcaaaacaataaaaataaataaatagatgttaattgtatctaaaaattaccttcacagaaacagctagaataatgtttgaccaaagaaccaaagcccggccaaggtattgcatagactgaaccatcccagggacacacttaggctacaaaaggatgtttgattgtctgaaactcaagctccatgcggtgttctgtatcttatctgcccaccgaggcctggttttcatccccacgggtgtccagagcaactccactccctccagagaagccctcggccacgtgggcacgtccaggggaccccgcccggggaaacagaatggcattgttcccccagcttccttttctgtgggtttctaatggggaaaagtgtgttggaggccaggcatgaatcattctccgcccacgcagcagacacagcatcccaggggagctgaggcggaggggaggcaatgagatccacctttgcagacaatgtggaggtgatcccccaccctctgcagagaaaggcgtccctgcagactgagaacatgcagagtttgaggttaaggtctcttggggtctcacgagagtaaaagaatgtaagctagagaaccaggtgtggtggctcccgcctgtaatcccagcactttgggaggccgaggcgagcagatcacccggggtcaggaattcgagaccagccaacatggcgaaaccccatctctactgaaagtacaaagattagctgggtgtggtcaggcgcggtggctcacgcctgtaatcccagcactttgggaggccaaggcgggaggatcacgaggtcaggagatcgagaccatcctggctaacgtggtgaaaccccgtctctactaaaaatacaaaaaattagccaggcgtggtggcgggcgcctgtagtccaagctactcaggaggcggagtcaggagaatggtgtgaacctgggaaatggagcttgcagtgagccaagatcgcaccaccgcactccagcctgggcgacagagtaaggctccgtcaaaaaaaaaaaaaaaaaaaattagctgggtgtggtggcatgcacctgtaatcccagctactcgggaagctgaggcaggagaattgcttgaacccgggaggcagaagttgcagtgagctgagatcatgccactgcactccagcctgggggacagagccaaactccatctcaaaaaaaaaaaaaaagagagaaaagcccaggcgcggtggcctacacctgtaatcctataatcccagcactttgggaggccgaggcgggcggattacctgaggccaccgtggctaccttggcccatccattggtgagaaggggtcacagccggagctcgcagggggcggagctcgcggagggcggggctcgcggggggcggggctcgcgggggcggggctcgagggggcggggctcgagggggcggggctcgcacagggcttgaatcccaggaggagggatcccagtgctcccggtggagtctgcctgccccaggtgtcctgttacatccctcaggggccgacagctgcccagttctgcttagggatccatgcgacacaggcagtttctcgcggaaaatgggtggatcccctgctccaacgagactgaaagcggcaggagcatggatgaacgttgcggtgttgccgttgcacatggctgccacctggccatgttctgggactcatgcttgtaaatccttttacatttcaaagccttagtgatgactcatcagtgggagaacacccggaacagggactggcaaatgattataaacggtcagagaggtggccgggtacagcggctcacatctggaggccgaggcaggaggatcacttgaggccaggagttcaaggccagactggacaacatagtgagaccccaatctctacagagtataaaaaaattaaccgggtgtggtggcatgcctgtagtcctatctactctggaatctaaggcaggaggatcgtttgagcctgcgaggtagaggctgcagtgagctatgatagcaccactgcattccagcctgggtgacagagcaggaccttgtctctaaaaaataaaaaaagattacgtatctattccaggggtcaggaaacaacatcctgtgggccagagccagatctggtctgcagaattattttttcattttattattattactagagactgggtgttgctctgtcacccaggctggagtgcagtggtgtgatcacaggtccttgcagcctcaacctcctggtctcaagcagtcctcccacctcagccttctgagtagctgggatcacagatacgtgccccaccatgcccagctaatttaatttttattttctgtcgacatggggtcttgctatgttgcccaggctggtctcaaactcctggactcaagcgattgtcctgccgcggcctcttaaggagatgggattggccgggcacggtggctcacgcctgtaatcccagcattttgggaggctgaggtgggcagatcacgagatcaggagattgagaccatcctggctaacatggtgaaaccccgtctctactaaaaatacaaaaaattagctgggcgtggtggcgggcgcctgtagtcccagctacttgggaggctgaggcaggagaatggcgtgaacctgggaggcggagcttgcagtgagccgagatcgcgccactggactccagcctgggtgacagagcaagactccgtctcaaaaaaaaaaaaaccaaaaaaacaaagataggattacaggcgtgagccactgcacccagccaggatttgaattttagtgtccataaagtgtgacgagaacatagttgtgtctaattctttacacgtggtcggctgctttagcgtgacaatgggagagtgaagggacacagtcctgactgccttgtgagcatgaaaatatttactgctgccagcacagtggctcacacctgtcatcccagcactttgggaggccaaggcaggtgggtcacttgaggccaggagtttgagaacagcctggccaatatggtgaaaccccatctctactagaaatacaaaaattagccaggtgtgatggcacacgcctgtggtcccagctacttgggagactgaggcatgagaatcacttgaacctgagaggcggagcttgtagtgagatcacgccactgcacagtgcacctgtggtcccagcactttgggaggctgaggagggaaggttgcctgaggccaggagttcaaaaccagcctgggcaatgtagcaagatcccctctccacaaaaaacagaaaaatgaggccgggtgcagtggctcacgcctgtaatcccagcactttgggaggccaaggcgggtggatcacctgaggtcaggagttcaaaaccagcctgggcaacataacaagattcccctctctacaaaaaaatagaaaagtgaggctgggtgaggtggctcatgcctgtaatcccagcactttgggaggccgaggtgggtggatcaactgaggtcaggagttcgagaccagcctggccaacatggcaaaaccccctctctactaaaaatataaaaattagccaggtgtggtgctgggcgcctgtaatcccagctattggggaggctgaggaaggagaatcgcttgaacctgggaggcagaggttgcagtgagcagagactgtgccactgcactccagccaggtcaacaagagtaagactccatctcaatagaaaagaaaggaaaggaaaggaaaggaagggaagggaaaggaagggaagggaaaggaagggaggaagggagaaagggaagggaagggagaaaggaaaatgagcatggcgtggtgacgtacacctgtggtcccagctatgggaggctgaggtgggaggatcacttaagcccggaaatttgaagttgcagtgagccgagatcgcaccacagcactccagtatgggcaacagagagactctctctctctttaaaaaagaaaaaataaaaatcaggggtggggtgtgaaggtcaggagcactttgggttttaggctgctggagggattttagtgtgtgtgtcgcagggatgatgtaatctgatggacacttcaaaggcacccttaacggctgtgaccagctcacagaggggcaggggagggaggaaagaggccagtccctccagacgggatgctggtgggctgtccagagccgtagctgcacagatggtgaggaatgactggattaggaatctcttttgaacactagccaacaggagttgttgatgagtgtgacagaaaaagagtctgtggtcacaaattctttgatgcacctcccttcgaaagctggcactcaggctgggcgcggtggctcacgccggtaatcccagcactttgggaggcccaggtgggaggatcgcgtgaggtcaggagtttgagaccagcttgggcagcataggaagactccctctctacaaaaaacttaattagctgggcatagtggcacacacgtggccctagctactaggaggcggaggtgggaggatcgcttgagcccaggaggtggaggctgcagtgagctgtgatcacaccattgcactccagcctgggcaacagagaaagaccctgtctcaaaaacaaacaaaaaaggaggcgggagggtgagaaagagagactggaagaggctgcactgtggctgtgaagggagaagaaggggccctgaggcttaagacgctggtaaagatgggaaacgtattctcccctggagcccccagaagggcccaggcctgcccacagctcgatggtgagccctgcaagatggatctcagacttctgactttcagaactgtgagataatcaatcagtattccatttttaaattctttgagacagggtctggctctgtcacccaggctggagtacagtggcacaatcacagctcactgcagcttccacctcctgggctcaagtgatcctcctgcctcagcctcctgagtggctaggattacaggcatgagccaccacatctggctaatttttgttcattttttgtggagatgggggtctcactatattgcccaggctggtctcaaactcctgggctcgagcaatcctctcacctcagcctcccacaatgctgggattacaggtgtgagccaccacgcctggccgaaaactcggtgtccctctaagcccccaagcgtggggtcctttgttacagcagctgtgggaacttcagacttactctttctagcaatggaccgcagcgacccacgggagtcctcatcctcacacagccgcccagccagcagtcacgttccaccttttttttttttttttgagatggcgtcttgctctgtcgccaggctggagtgcagtggcgtgatctcagctccctgcaacctccgcctcccgggttcaagcgattctcctgcctcagcctcccgagtagctgggattacaggcgcccaccaccacgcctgactaattttttgtatttttagtagagatggggtttcaccatgttggccaggctggtctcaaactcttgacctcaagtgattcacccaccttggcctcccaaagtgctgggattacaggcataagccaccgcatctggtcttttttttttttttttttggagtctcgctctgtcacccgggctggagtgcagtagcgtgatctcggttcactgcagcctccgcctcccgggttcaagcgattctcctgcctcagcctcctgggtagctggattacaggtgtgcaccaacatgcctggctaattttggatttttagtagagatggggtttctccatgttggccgggctgatctggaattcccgacctcaaatcgtcctcctgcctcagcctcccaaagtgctgggatgacaggcgtgagccaccgcgccccgccgtttttaagggtatagttgcaacccttgcttatgggaagagaagcaccttcagcctctgaccccgtgtttctgtcttgctgtgtggcatccagctcgctgtctgcgtgtctctgagccatggagcccactgtggctgacgtacacctcgtgcccaggacaaccaaggaagtccccgctctggatgccgcgtgctgtcgagcggccagcattggcgtggtggccaccagccttgtcgtcctcaccctgggagtccttttgggtaagtggctatgggattggctgggttcgcaatacaagggacatgtgcaaagtcaccgggaagtgacttgatggtgtctccttggccatctggaatcaaagggcagtgtctaggcgtggagatgaaggctgccctaggccaggcgggtgggcggggagtggagcagatgagttcctacgtgtgtcagttttcccgactaaagaagctcccgaaggaagttttcacagctggggtgacagagaaacagagacagggaaatgaccttgttttaaattttggcaaatcagcaaaatacccaaagtagtttttttttttgtttttttttttttttgagacggagtctctctctgtcgcccaggctggagtgcagtggtgtgatatctcggctcactgcaagctccacctcccgggttcacaccgttctcctgtgtcagcctccccgagtagctgggactacaggcgcccgccaccacccccggctaattttttgtatttttagtagagacggggtttcaccgtgttagccaggatggtctcgatctcctgacctcatgatccgcccgcctcagcctcccaaagtgctgggattacaggcatgagccaccgcgcccggccccaaaagtatttttataaaaccgagcaactgggttgggcgtggtggctcccgcctgtaatcccagcactttgggaggctgaggcgggaggaccatcggagcccaggagtttgagaacagcctaggcaacatgataaagccctgcctctacagaaaatacaaaaaattacccaggcgtggtggcacctgcagtcccagctactcaggaggctgaggcaggagaatcgcttgaacctgggaggcagaggttgcagtgagctgagatcgcaccactgcactccagcctgggtgacagagtgagactctatctcaaaaaataaaaacataataataaatttaaaataaggccgggtgcagtggctcatacctgtaatctcaactttttgggaggctgaagtgagcagatcatgaggtcaggagttcgagaccaccctgaccaacatggtgaaaccccatctctactaaaaatacaagaaagaaagaaagaaagaaagggagggagggagggagggaggcaggcaggcaggtaggcaggaaggaaggaagatagctgagcatggtggtgcacgcctgttatcccagctacttgggaggctgaggcaggagaattgcttgagcccaggaggaggcagagattgcagtgagccgagatcatgcccttgcagtccagcctgggcaacagagcaattccatctcaaaaaaaaaaaaaaaaaaaaaagttaattttaacatttaaatgatgataataaacagcaatttggggagaaatgctctcgtgtggcaaaatagtaagttcgcgatcctatgagaatcctcctaggtttttttttttcttttttcttttttttaaaaaatatttgtggaacttctggaaactcccagagccagacatgtttgactgaggccctctagtggctgtaggtaccaagtacaatacaatttgggttcctcgtgtgagtgtatttgtgtgttcatgagtgtgtgcatggtgcacacgtgttcatttgcatgcgtttgtgcatgcatgtgtgtgtctgcgtgtgtatctatgtgtgcatgcgtgtgtgtgtgtgtgtgtccatcacctagtgagaggcaggggcggggcagagtttctcatctgcattgtaacaaatacattttgggaaaaacagataaatataattcccatcaggacccccctgaaaggaaaggaagtctttttttttttttttgagatggagtctcactctgtctcccaggcgcgacagagtgcagtggcacaatctcagctcatcacaacctccaccacccaggttcaagcgattctcctgcctcagcctcctgggtagctgagattacaggtgtgtgccactacgccgagctaatttttgtatttttagtagagatagggttttgccatattggccaggatggtctcaaactgctgacctcaagtgatccacctgccttggcctccgaaagtgctgggattacagacatgagccaccacgccccatcaggaagtctttcaagaagcacttaaggccaagtgtggtggctcctgcctgtaatcccagcactctgggaggctgaggcaggaggattgcttgagctcaggagttcgagaccaacctaggcaacatagcaagaccccatctctacaaaaaattaaataatgaagacaagaaacatttaaaattaaaattttataatgttttcagtgaaaatgagtggttgtgcgtgccagtagtccctgctactcgggagactgaggtgggaggattgcttgagcccaggagttggagcctgcagtgagctatgatcacaccactgcactccagcttgggagacagagtgacaccctgataaaaaataaaaaagaaaaagaaaaaaggacatgatgccaggcgtagtggctcacgccagtaatcccagctctctgggacgctgaaacgggaggattgcttgagcccaggagttccagttcagcctggtaacatggtgaaaccctgtctctacaaaaaatgcagaaaattagccagggccgggcgaagccagctgggctcctgagtcgagtggggacttgaagaattgttatgtctagctggaggattgtatatgcaccagtgaacactctgtgtctagctaatctggtggggacttggataacttttatgtctaactagaggattgtaaatgcaccaataagcactctgtgtctagctcaaggtttataaacacaccaatcagtgctctgtgtctagctaatctagtggggacttggagaaattttaagtctagctaaaggtttgtaaatgcaccaatgagcaccctgtgtctagctcaaggtttgcaaatgcaccaatcgcaccaatcagtgttctgtgtctagctaatctagtggggacttggagaacttttgtgtctagctaaagatttgtaaatgcaccaatcagcaccctgcgtctagctcagggattgtaaacacaccaatcagcaccctgtcaaaacggaccagtcagctctctgtaaaatggaccaatcagcgctctgtaaaatgggccaatcaggaggatgtgggtggggccagataagggaataaaagcggactgctggagccagcagcggcaaccggcttggggaccttttcacagtgtagaggatttgttttttaattctctgcgagaaatcttgctgctgctcactcgttgggtgtgagatgcttttatgagctgtaacactcactgtgaaggtctgcagtttcactcctgaggccagcaaaaccacaaacccaccaggaggaatgaacaactccagacacgctgccttaagagctgcaacactccctgggaaggtctacagcgtcactcctgaagcaagcaagaccacgaacccaccagaaggaagaaattccgaacacatccgaacatcagcaagaacaaactccggacacaccatctttaagaaatgtaacactcagcgtgaggatccgcagcttcattcttgaagtcagtgagaccaagaacccacgaatttcggacacagtaacatggggaaaccctgtctctacaaaagaatgcaaacaattagccagggccaggcatagtagctcaccccggtaatcccagcactttgggaggctgaggcaggtagatcatgaggtcaggagtttgagaccagcctggccaacatgggtgaaaccctgtctttactaaaatacaaaaattagctgggcagactggtacgcgcctgtaatcccagctactcaggaggctgaggttggagaattgcttgaacccgggaagtggaggttgcagtgagccgagatcatgccactgcactccaacctgggcaacaaagggagaccatgtctccaaaaaaaaaaaaaaaaaaaaaaagctgggcgcggtggctcccacctgtaatcccagcactctgggaggccgggttgggcggatcatgaggtcaggagattgaaaccatcctggccaacatgatgaaaccccgtctctactaaaatacaaaaaacattagttggtcatggtggcatgtgcctgtagtcctagctactcgggaagctaaggcaagggaatcgcttggacccaggaggcagaggttgcactgagccaagatcgtgccactgcatcccagcctggcaacagagtgtgagactgtgtcaagaaaagagaaggaaagagaaagctagccagccaggcgtgatagtgggcgcctgtggtctctgtggtctagctacttgggaggctaaggcaggaggatcacctgagcccatgaggtcgaggctgcagtgagcagtgattgtgccactgcactgaagcccgaacaatagagaccttgtctcaaaaaaataaaacatttaaaaaaataaaaatgagaattcagcccttcgcaaacagctcaccattttagttggagatgagaggctgagtggagagcgggaggcgttctgaactatttctgcaacttcctgaatctgcagttgtttagagtagaaacagagtgaggttgggacacagaggcggggcaattcagtccgcccaccagggtgctcgtgtttctttagtttcttgaacgagaaaacataccgtttttagaattggttcagaatattctatctactgaatatatggctacgtaaatacccatctagcatatctatccatttaggataaacggaattgggacccagctttcacggtttacgcggttgctatttgcatggtttaaatgttgtaattacggccattttttttgcgctggtgtgcacttctggtagttttaacgtatttttgaccaaaactcgtgctctcatggtttctgtggttgctctcgtagtttttatttagatttttttctgctgctgcttgcatcagcataggaattttttatgactattatttttgctgtactttgtactttggacacaacacagccaacagctaaaaaccagtgctttctgcctggcgtggtggctcacgcctgtcatcccggcactttggcaggctgaggcgggcagatcacctgaggtcaggagttcccgaccagcctggccaatgtggcgaaaccccatctctgctaaaaatacaaaaattaacgctgggtgcagtggctcacgcctgtaatctcagcacttcgggaggccaaggcgggtggatcacctgaggtcaggagttccagagcagcctggccaacatggtgaaatccagtctgtactaaaaatacaaaaaaactagccaggtgtggtggtccacgcctgtaatcccagctactcagcaggttgaggcaggaggctgaggcaggaggatcgcttgaacccgggagatggaggttgcagcgagctgagaaaacaccactgcactccagcctgggtgacagagtgagaccctatctcaaaacaaacaaggccgggcgcggtggctcatgcctgttaatcccagtgctttgggaagccaaggctggcggatcatctgaggtcgggagtttgagaccagcctggccaacatggagaaaccccatctgtactagctgggtatggtggtgcatgcctgtaatctcagctactccggaggctgaggcggcaggagaattgcttgaacccgggaggcggaggttacagtgaggcgagatcatgccattgcactccagtgtgggcaacaagagcaaaactctgtctcaaaacaaacaggccgggtgtggtggctcacgcctgtaatctgagcactttgggaggccgaggagggcggatcacgaggtcaggagatagagaccatcctggctaacacagtgaaatcccgtctctactaaaaatacaaaaaaattagccacgcgtggtcgtgggtgcctgtagtcccagctactcgggaggctgaggcaggagaatggcatgaacccgggaggcgcagcttgcagtgagccgagattgcgccaccgcactccagcctgggcgacagagcgagactctgtctcaaacaaacaaacacaaaccaaccagtggtttttgaagatgacctcatgggactgtggccggagagtcctgatggcctctggctgtgctcatgcccctgccataggaggcggggactgtcatttcaccgtctcctgatgccattccagaggttacgccctgaagtcagctcagatcctgggccaggcactgcatgggagacaggcatgagcaggacctctttctgccttcgaggaaaacacgggggcatctggggctcacttggcactcatccaccttgtgctgtacctggggacctccgggtgggtggctgtcatagaattcggctccaaaccaggatgcttttgggaattgagggagagccctgtgagtagctattcagggctatcacgggggcgtcgaccaccccactgcgtgtcaggagtgaccaccagggtgtgtgagtgcaaacagggcggggcctgggtggcagctcagcggagccctgagcccccaaaggtgggctctctcacgggccctggtctcgtccccagccttcctctctacacagggcttccacgtggaccacacggccgagctgcggggaatccggtggaccagcagtttgcggcgggagacctcggactatcaccgcacgctgacgcccaccctggaggcactggtgagggtggtctgtgtttgggggccagggaggaagagcgggtggccgggggctttgacctggaggtgctttccgtgtgggagggaggcaggccacaggcaacgaagctgaggtggaggctgtgagaccgggaggccaggccagggggcgggcaggacgaggccaggtggccaaggcagatacctgcaaggcagagctgtatccactgaggacacactcacatgggactttaggccacatttagaggtttttttttttttcttttttttcttgagacggagtctcactctgtcacccaggctggggtgcagtggaatgatctcggctcactgcaagctccgctgctcaggttcaagcgattctcctgcctcagcctcccgagtagctgggattacaggtgcacgccaccacgtccagctgatttttgtatttttagtagagacggggtttcaccatgtaggacaggatggtcttgaactcctgacctcaaatgatcttccctccacggcctcccaaagtgctgggattacaggcgtgagtcaccgtacccaacctgccacatttagagttttacattttattctaaaggggaatcagagccctcatgcacagctgggggaaggtattttattttatttttttgagacggagtcttgctctgttgtccaggctggagtgcagtggcaggatcatggctcactgcaacctctgcctcccgggttcaagcgattctcctgtctcagcctcctgagtagccagggttacaggcacccaccacctaggatgaacagggaaacacagcgtggctatgcacacactggaatatgactcagccaggaaaaggggccaggcttggacacaggacacagcgaattatattttaatgaaaaaataatgttttccattttattcgaagagaaacagacgtgtgaccacatcagcaatcacgtattaaaaacagcactccaggcgggcacggtgggtggctcacatctgtaatcccagcactttgggaggccgaggagagtggatacctgaggtcaggagttttgagaccagcctgagcaacatgacaaaatcccaccattagtaaaaacacaaaaattagcggggcgtggtggtgtgtgcctgtagtctcagctactcgggaggctgaggtgggaggattgcctgagcccaggaggcagaagttgcagtgagccaagatcgtgccattgcactccagcctgggtgaccgagtgagactccatcttaaaaaacaatttttaaaaataggctgggcgtggtggctcacgcctgtgacgcctcctgggctcaagcaatcctcccacctcagcctcccgagtagctgggagtgcaggcacacaccaccatgcccagctaatttgggaggctgaggtgggcggatcacgaggtcaggagttcaagaccagcctggccaacatagtgaaaccctgtccctactaaaaaatacaaaaaattagccacgcatggtggtgtgtgcctgtaatcccagctacttgggaggctgaggcaggagaattgcttgaacctgagagacggaagttgcaatgagccgagatcgtgccactgcactccaccccaggcgacagagcaagactctgtctcaaaataataataataataaaaaatttaaaaataaaacataagtctgggcgtggtggctcacaactgtaatcctagcactgtggaaaaccaaggcaggtggatcacaaggtcaggagttcgagaccagcctggccaacatagtgaaaccccatttctactaaaaatacaaaaaattagttgggcatggtggcgggcacctgtaatcccagcttcttgggaggctgaggcagcagaatcgcttgaacctgggaggcggaggttgcagtgagtggagaatgcactactgcactccagcctgggtgacagagcaagactctgtctcacaatacatacatacatacatacgtacatatagataaaaatttaaaataataaaaggaaatgctttcccatggaaccaaccccttctccagctccctccaacacctgacaggcctctgcagtgccagggtgcccatgctgtgggtctcaacatttgatattcttgtttctattgcagtttgtaagtagttttcagaagacagagttagaggcaagctgcgtgggttgctcggtactgaattataggtgagttggagcttccattgggtgaaggaaacttggtggacatctgggagtttctggaggagtccagaaaagtttggaagattctagaagattccagaagattccagcagggcggagcccctccctctccaagggcctctcctccatacctgtagggatgggaactccagtgtcctcgtacatttccagctgcactttctgctgcgacccctccagacgctgagcctgggcctggaggaggagctattgcagcgagggatccgggcaaggctgcgggagcacggcatctccctggctgcctatggcacaattgtgtcggctgagctcacaggtgagtgggcagccgagaccgaaaccccatcacgaggaggctggagtggggcaggagctgcaagatacattttgataaccaccccttcccataaaaagaaaacaaactggccgggtgtggtggctcatgcctgcaaccccagcattttgggaggccgaggcgggtggatcacctgaggtcaggagtttgagaccagcctggccaacaccccatctgtactaaaaatacaaaaatcagttgggcgtggtggtgtgcacctgtaatcctacctacacaggaggctgaggcaggagaactgcttcaacctgggaggcggaggttgcagtgagccgagatcgtgccattgcactccagcctgggcaaaaagagtgaaacttcgtttcaaaaacaaacaaacaaacaaatgtaaaaactgacattgcctttgccttaatggtgtggataaggggtcagccatcttgttctgtaaagagccagagtgttgtgttgtgttgtgttgtcttgtcttgtcttctcttttcttttccattttttttatttttgagacaggatctcactctgttgcccagtctggagtgcaataatgaagtcttggctcactgcagcttctgcctcccaggttcaagcaattttcctgcctcagtagctcccgactcactcccgagtagctgggattacaggcacgcaccaccacgcctggctaatttttgtatttttagtgagatggggtttcaccatgtgtactgggctggtcttggactcctgacctcaggtgatcctcctgccttggcctcccaaagtgctgggattataggtgtgagccacgtgcccagttaatattttcatctttgtggtccgttgggtttctgtgacaagcactcagctctgttatttgtagcacaaaagtagccacagacaatacataaatgaataggtgtggctgtttaccaataaaacttattaaaaataacaagcagtgggctggatttggcctatggccgtagttggccaaccccctactgtagaatcaaggataaatgctacactctaataaaattgtatggaaggccgggtgtggtggcttatgcctgtaattccagcaatttgggaggccaaggtgggctgatcacttcagatcaggagttcgagaccagcctggccaacatggcgaaaccccgtctctactaaaaatacaaaaatgagctgggtgtggtggcacgtgcctgtaatcccagctgctcaggaggctgaggcaggagaattgctggaacccaggaggcggaggttgcagtgagccaaggttgcactactgcactccagcctgggtgacagagtgagactccatctcaaaaaaaaattaataaaaataaaaaataaaattatacagtgcatgattttgtatgcacctggttttaaaaaataaaaaacaaaattgtacggtgcagcaggtcatgattggagagtcagatgcaagttcagaccattgttaaagatttgttgccaggtgtggtggctcatgcctgtaatcccagcactttgggaggccgaggtgggtggatcacctgaggtcaggagtttgagaccagccgggccaacacggtgaaaccccatctctactaaaaataaaaaaattagccgggcatggtggcgggcgcctataatcccagctacttgggaggctgaggcaggagaattgcttaaacctggtggaggtggaggttgcagtgagccaagatagcaccactgcactgtagcctgggtaacagagtgagactctgtcttaaaaaaaaaaaaaaaatggccgggcgcggtggcttacgcctgtaatcccagcactttaggaggccgaggtgggcagatcacaaggtcaggagatcgagaccatcctggctaacacggtgaaaccccgtctctactaaaaatacaaaaaatcagccgggcgtggtggcgggcgcctgtagtcccagctgcttgggacgctgaggcaggagaatagcgtgaacccgggaggcggagcttgaagtgagccgagatcgcgccactgctctccagcctgggcgacagagggagactccgtctcaaaaaaaaaaagtcaccttgaccttgacatgcaggacatttatggttccctccccaccaaccgtcacatgctggtcgaggtcttaataacctctgctccagcgttcacagaacttcccttggtgatagggaggttccaggccttgtgcagtttggtggccgtccgagccctggggctggtgagtgctccccgtggggcaagtgagactgaggatcggtgttgaagtagatttcatcctcgctgattgaaggcagaatttaagtgacgccagggtggacaaggcagctgctcactttactccatgacctgcctgcaataggacgttttctttctttcttttttctttttttttgagatggagtctcgctctgtcgcccaggctggagtacaatggtgtgatctcggctcactgcaacctctgcctcccgggttcaagcgattgtcctgcctcagcctcccgagtagctgggattacaggcgcccggcaccacacccgtctaatttttgtatttttagtagagacagggtttcaccatgttggccaggctggtctgtaactcctgaccgcaaatgatccacccgcctcagcctcccaaagtgctgggattacaggtgtgagccaccgcgcccggccaataggatgtgttcaaagggttttaccgcttattcagtgagcttctatcttctctgttttgttgcagggagacataagggacccttggcagaaagagacttcaaatcaggtatgtttttctctctggccttttctctgattgcagttactgacagaggtttcctaagactcatttcaaggaagtgaaggaatccctggaacgaggctgggcgcggtggctcacatctgtcgtcccagcacttcaggaggctgaggcaggaggatcacttgaggccaggagtttgagaccaggctggacaacagagcgagaccctatctctacaaaaataataataaaaaaaggccaaaaataatttttaaaattattataaaaaataataaaaattagccgggcatagtggcgtattgcctgtactctcagctacttgggaggctgaggaaggaggatcgcttgaacccaggaggcagaggctgcggtgagctgagatcacgccactgcactccagcctgggtgacagagtgaaactgtgtctcaaaaaataatacataaggccgggcgcactggctcatgcctgtaatcccagcactttgggaggccgaggtgggtggatcacctgaggtcaggagttcgagaccagcctgaccaacatggagaaaccccatctcactaaaaatacaaaattagccaggcgtggtggggcgtgcctgtaatcccagctactcaggaggctgaggcatgagaatcacttcaaccagggaggcggaggttgcggtgagccgcgattgtgccattgcactccaggctgggcaacaagagtgaaactctgtctcaaaaaaataaataaataaaataaaataaaaataaataaaataaatagcctgggttggtggtgtgcacctgtggtcccaactactcaggaggctgaggcaggaggattgcttgaacctggagttagaggctgcggtgagctgtgattgcaccactgcactcccgtttgggtaacagagctagaccctgtctcaaaaacaaaaataaaaacaaggaaaaggaaagaaaaggagagagagagtttccacatttccgtaccctggtggtactaagtatagcatggtgccttactccaaccaggagatgtagcatgaggtcagaaagtcggttcttttctgtcctcaggccgctgtccagggaactccttttcctgcgggaacagccagtgtgtgaccaaggtgaacccggagtgtgacgaccaggaggactgctccgatgggtccgacgaggcgcactgcggtcagtctgcctgtctggcctggtctctgggccccttcccttttccagggtcagctgctggctctggtctgtggtcactgtgcttatttcactgggcacacaggcctggcatttatgggggctgggcagagaaaagaaaggggcacccatggtatggggagaaacatgagcaaacagcagagtaaaggaaaagtgcaggtgtgtgatgggaagaagcctggggagaggagggagaagatatcaggctgaaaacagaggttgtggccacagcctgggaagtgttgaataccaggaactggagctctgtcctataagcagtggggcgtggccacagggatgtgagcaacggaaagagacaattaaaatgccgtaagagattagcagggtgcggtggctcacacctgtcatcccagcactttgggaggccaaggcaggaggatcacttgaggccaggagtttcagaccagcctggacaatatagtgagaccccatctctactaaaaaaaaaaaaaaattggccaggcacggtggctcacacctgtaatcccagcactttgggaggctgaggcaggtagatcacgaggtcaggagatcgagaccatcgtggctaacacggtgaaaccccctctctactaaaaatacaaaaaattagccgggcgtggtggcgggcgcctgtagtcccagctatttgggaggctgaggcaggagaatggcgtgaacccgggaggtggagcttgcagtgagccaagatcacgccactgcactccagcctggcaacagagcgagactctgtctcaaaaaaaaaaaaaaaaaagaaaaaaaaattagccagcgtggtggtgggcgcctgtggccccagctactcaggaggctgaggtggaaggattgcttgagcccagtagattgaggctgcagtgagctatgattgcactactgcactgtccagcctggataatagagtgagaccttgtctcaaaaataaataaaatgctggaagagtagccaatgtttctataaaaatactagcccatgcaataaggtaaggacagcagtttaagtattgaaaaggaagaggaaaatcttaattcatttgaaatcattgtctgtctaaaataaatcaatatccaaacagaaggagagaagctgaaagagtaaaataaaatgaatcaagaaattgactaaaaagctatttagaataaaggctgggtgcagtgggtcacgcctgtaatcccagcactttgggaggctgaggcaggagaatcccttgaacctgggaggtggaggttacagtgagccaagatcacgccactgtactccagcctgagctacagagcaaaactctgtctcaaaaaaaaaaaagctgtcattttgctttatacagtaataataagatagaagatacaaaggaaaaaatatctttcatgatcagtagtgacaaaaaatatcaagactaggcctgatgccgtggctcaggcctgtaatcccagcactttgggacgccgaggcaggcagatcacttgatgtcaggagttcgagaccagcctggtcaatttggtgaaaccccggctctactaaaagtacaaaaaattagccaggtgtggtggcgggtgcctgtaatcccagctactcaggaggctgaggtaggagaatcccttgaacccgggaggcagagcttgcagtgagttgagatcacgccactgcactccagcctggacaacagagcgagactccatctcaaaaaaaaaaaaaaaaaatcaaagactaaacttacaaacgtgccatgcctgtgatgataattattatatataattatagaattacaaaattttgtgaaggacataaaagtagactaaataagcagacagacacaatatcctatacaaacatgtacgtggggtcatcgccccttacccacagctaagatagagacctttctctgccactcactggtgcacgtgaccttgaatgcttgacctacgtgccaggatggggcagccgaggagttgaagaggaagggatggggagaccccagaagagtcagggaagccaaggaggggcccccaagcatctctttgaacttagggactgtagacgagagactcagagatgcatgttctgggagttcagggtgaggtcctgccttcgtggggtcatggctggtgacctgctgtcttgcagagtgtggcttgcagcctgcctggaggatggccggcaggatcgtgggcggcatggaagcatccccgggggagtttccgtggcaagccagccttcgagagaacaaggagcacttctgtggggccgccatcatcaacgccaggtggctggtgtctgctgctcactgcttcaatgagtaagcccccatcccaaagcaccaaacccgaaccctctgtatttctcctgccttccctcgtgcactggggacgtcacttctggtttccttagagcccctggaagtaattttttcttttcctttctttcttgcttttgctgttgttgaatctgagggcattctttttttttttttttttgagacagaatctcgctctgttgtccaggctggagtgcagtgacgcgatcttggctcactgcaagctccgcctcctgggttcacgccattctcctgcctcagcctcccgagtagctgggactacaggcgcccgccaccacgcctgttgtatttttagtagagacggggtttcaccgtgttagccaggatggtctcaatctcctgaccttgtgatctgcctgccttggcctcccaaagtgctgggattacaggtgtgagccatcgtgcccggcctcttttctttctttctttcttttttttttttttgagatggagtctcgctctgtcacccaggctggagtgcagtggcgtgatctcggctcactgcaagctccgcctcccgggttcacgccattctcctgcctcagcctcccgagtagctgggaatacaggcgcccgccaccacgcccagctaatttaatttttttttgtatttttagtagagtcggggtttcaccatgttagtcaggatggtctcgatctcctgacctcgtgatccgcccacctcggcctcccaaagcgctgggattacaggcgtgagccactgcgcccggcctctttattttattttattttttcttttgagacagagtctcagtctgtcgccctggctggagtgcagtggtgcgatctcagctcactgcaacctccacctcctgggataaagcaattctcttgcctcagcctcccaagtagctgggactacaggtgcacgccaccatgcctggctaatttttttttttttgtataattagtagagatgggttttcgccatgttggccaggctggtctcgaactcctgtcctcaggtgatccgcccacctcagcctcccaaagtgctgggattacaggcgtgagccaccgtgcctggcccacttgctgttcttttgagagtagccatgccagtgggtgtgaagtagcatctccctgtggttttgacttggatttctcggtgaccaatgacattttgttgatgttttgctcattgtggacattttttgcattcactttgattttttaaaatattctgtcgtgatattatcctttttttttttttgagacagagtctcactctgtcgccctgctggagtacagtggtgcagttttggctctctgtaagctccacctcccgggatcaagcgattctcctgcctcagcctcccgagtagctgggattacaggcacccgccaccatggctggctaatttttgtatttttagtagagacgtggttttgccatgttggccaggctggtcttgaactcctggcctcaagtgatctgcccgtctctgcctcccaaagtgctgggattacatgtgtgagccactgcacccggctcgatatcatttatcttgatggctgagatttttggcaactctttaaattttgtgcccaaggctcatggctggctcccctcaccctaatcccaactctgtctcatcctgtctttgtttaaaatgttgatacttggacaggctatagtgagcttgtggctcatgagtgtaatcccagcactttgggaggctgaggtggggggatcacttgaggtcaggagtttgagaccagcctggccaacatggtgaaagcttgtctctactaaaaacacacaaaaaaattagtcgggcatagggggcgcaaacctgtcatcccagttacttgggaggctgaggcacgaggatcacttgaacccgggaggtggaagttgcagtgagctgagatcacgccactgcactccagtctgggagacagagcgagactctgtctcaaaaaaacaaaacaaaacaaaaatgttgatacttcatgcatcatgcattctcctgcacctgtgatttttttcttttcttttctttttttttttttttttttttgagacaggttacctgttgcccaggctggagtgcagtggcgcagtgatagctcactatagctcatgacagcctcaacctcccaggctcaggcaatcctcctacctcagcctcctgaggagctgaaaccacaggtgcacatcgccacaccccgctaatatatatatattttttctgagacagagtcttgctctgtcgcccaggctggagtgcagtggcacaatatcagctcactgcaacctccacctcccgggttcaagcaattctctgcctcagcctcctgagtggctgggattacaggcgcccatcactatgcccggctaatttttgtatttttagtagagatggggtttcaccatcttggccaggctggtcttgaattcctgccttcgtgatcctcccgcctcagcctcccaaagtgctgggattacaggcatgagccaccgcacctggcctgttttttgttgttgtttttaaagactgtgtttcgctatgttgcccaggctcgtcttgaactcctgggctcaggtgatcctcccgcttcagcctccaaaagtgtgggattacaggcatgagccactgtgtctggcctgatttttataaatactattcataaatattaatgtggggggataccccttacattttgcacccaaggcgagtgtcccgtctgcctcccccgacggctctgaccctcggtggcttctgagctggggtttgctcctgcaggttccaagacccgacgaagtgggtggcctacgtgggtgcgacctacctcagcggctcggaggccagcaccgtgcgggcccaggtggtccagatcgtcaagcaccccctgtacaacgcggacacggccgactttgacgtggctgtgctggagctgaccagccctctgcctttcggccggcacatccagcccgtgtgcctcccggctgccacacacatcttcccacccagcaagaagtgcctgatctcaggctggggctacctcaaggaggacttccgtaagcatcttcctcggcctgcaagtgagctcaggcaggcaggcgggcaaataacgcagaaaagggccaggtgaggtggctcacgcctgtcatcccagcactttgggaggccgaggcgggtggatcacgaggtcaggcgtttgagaccagcctggccaacatagtgaaaacccgtctctactaaaaaatacacacacacacacacaaaattagccaggcatggtggtgcgtgcctataattccagctactcaggaggctaaggcaggagaattgcttgaacccaggagatggaggttgcactgagccaagatcgcaccactggactccagcctgggtgacagtgggaggctccatctcaaaataataataataataataataataataataataataataatgatgatgcagaaaaacacagtgggtctgcattattctctgattctgtattcacgaattccactgcttgctaagatatatttataacccatcatcgatgctactgcgattttttttttttttttttgagatggagttttgctcttgttgcccaggctggagtgcagtggtgcgatctctgctcactgcagcctccgcctccgggttcaagcgattctcttgcctcagcctctgagtagctgggactataggcatgcaccaccacacccggcaactttatttttgtattttttagtagagacaaagtttcaccgtgttggccgggctggtcttgatctcctgacctcgtgatcttcctgcctcagcttcccaaagtgttgggattacaggtgtgagccacctcacccggccaaaaaaattgatcttaatgtactaaaatgcacatctaaatagtcacctgtggccagtggctactatattgggtggtgtagttccagggggttgtcaatcagccacaagatgactgacagagggaaatgaatccagtggagaaaaataaggtgggggtggcagctgcagctttaaatagggaggtcaggagatgcctcctggagagaggagatgaaggagcaagtcaggcaaattctgcagggacaagcatttcagacagcgggaacagcatgtgcaaaggccctggggtgggaggacagcagggcaggggttgatgtgactgatttaatatttagcaagggtggtgctggctgccgggttgggaatggatttcagtggggtgggaccagagtaagagaagtgagtggggaacagctataatgacccgggcaaggatgggcgtgagacaggggctgattctgtgtatatttgggggctgacctgaggccaacttggaatttgaggactgtggacctggaatgaggggcctgagatccctgagatggggaatgctgaggggtggagcttgcggaagggagatgaggacctcgggctgggggtgttaagtctgatgcctcttccttgtccaggcagagagtgttaccaggtggggtgtttaccttttgtagtttcagagccatgtgttgtaggtggccatgcttggagctggggaaactgagggaggcttggagaggagctgtccttcagcctcccagctcaaagtggctgccagggctccggcactctcaccctgcttttctctccccattcggccagtggtcaagccagaggtgctgcagaaagccactgtggagctgctggaccaggcactgtgtgccagcttgtacggccattcactcactgacaggatggtgtgcgctggctacctggacgggaaggtggactcctgccaggtgagcccccgatgccccagaccccagaaaaacacagaaatagacacgagcatgttcaaatgctgagcaattcacagatatctggatgcccgctgtgagcccccaacgccccagaccccagaaaaacacagacacgagcgtgttcaaatgctgggcgattcacagatatctggatgcccgttcttgaggaattttaaagcagttgggattgagaggcaggtgctgcttagaggatcttccagaagctctaacctgacttcaatccctcctctgccctccatggctccctgctcccttccagtgggccccaggtgcgtgccacagagcctggggtccctgagtaatctccctggctatgatggggtccctgtgtaaatcccccccagctgccctccaaaccgggacttgtgtggggacacagacactgttcccagcactgggcctgatacaacgtggcacccaagaaacacctcttgtatgaatgatgccagcacataccctgggcatcagattctctccgtctgtatgggaagggttggtctatgggaaccccgtggacttttgcccctgggtggtcagctgggccatgagtgagctgcaggctcaactcaagaaggttccagggctgggcacggtggctcacgcctgtaatcccagcactatgcgaggccaaggcgggtggatcacttgaggtcaggagtttgagaccagcctgagcaacatggcgaaaccttgtctctactaaaaatacaaaaattagcctggcgtggtggcaggtgcctgtaatcccagctcctcgggtggctgaggcaggagaatcatctgaacctgggagctggaggttgcagtgagctgagatcacgccattgcactccagcctgggcgacaaagcaagactctgtctcaaaaaaaaaaaaaaaaaaaaaaaaaaaaaaaaaagagaaaatcaggggtcatccaaagctgcttctgctgtatacctggaaccttctttttcttcttcttctttttttttttttttgagatggagtctcactctgtcacccaggctggagtgcagtggtgtgatctcagctcactgcaacctccgcctcccaggttcaagcgagtctcctgcctcagcctccagagtagctgtgattataggcatgcgccaccacacctagctaatttttgtatttttaattaagacactgtctcgctctgtcacccaggctggagtgcagtggcaccatcttggctcacctcccagtttcaagtggttctcatgcctcagcctcccgagtagctggaataacaggtgcccaccaccacgcctggataatttttatacttttagtaaagacagggtttcgccatgttggccaggctggtctcgaaatcctggcttcaggtgatctgcccaccttgtcctcccaaagtgctaggattacaggtgtgagccaccaggcccggccgacaattataatttttgttttcaaggtgtctcattctttcttctttcagccacctggtcttgtttgcagtgtcctgttcttgtttcgtggataccatttctttctttttctctgaggatcgtaatttaatccgttatgtttcttctatattctatatttgtggttaactgtatttcaggcaaacgtaagttattctgttgtaactgagtgtctttatttcatggagattggaatccctcaactggtgcttaagaatgaaaagctgggtgcagtggctcacacctgtaatcccagtactttgggaggctgaggcagccaggtcgcttgaggccaggagtttgagaccagttagggcaacatagcaaaacttttgtctctacaaaaacaaaaacaaaaacaaaaattagctgggtttggtggtgcatgcctgtagtcccagctacttgagaggctgaggtgggaggattatttgagcccaggaggtggaggttgcagtaagccaagatcacgccactgtactctagcctgagtgacagagtgagacgccgtctcaaacaaaattgaaaatttaaaaatgtcgctcaattcttgccgtgatcttatatttgctattcactttctcttggcgagggacattaacagtttgtgttcttggattctatgtaccctttcaagggaccaaagacctcctggtctcatttatcctttgtggttgcccaaatcccttttctaccccaaccaacccaggtcctcttgagaaagctttctcttgtgtcttgagcttctgcacatgggctgggctgccacttcctctgtcagcctctcgtgagtcttcatggtttctggtccacaaccagggatctctcctgcctaatttttttagcatggctgtggattcctgtctttcttgtgcatacctttgctcttgtttctaaggcctggtgggtgaggaaaagatgggagagactgctacatgtgcttagattgccatattgaaaccagaatctggagaaaatgctaggaactaatgagagggctcatgtttaagaatgtaagagtcggccaggcacggtggctcacgcctgtcatcccagcactttgggaggctgaggtgggcagatcacttaaggtcaggagttcaagaccagcctggccaacatggtgaaaccccgtctctactaaaaatacaagaaattagccgggcgtggtgatgcgtgcctataatcacagctacttgggaggctgaggcaggagaattgcttgaacctgggaggaggaggttgcagtgagccgagatcacgccattgcactccagcctgggcaacagagcaaaactctatctcaaaaacaaaaacaaacaaaaaaacgatacacagaacgtaagggtcagggtgaactggatatgggaaggtaaaaaatggtgaggccggacgagtgacagcagatgagcactttgggagcaatgctgcagctaccagtgagatatatggaggcacccgcgtggcagccatactgccagcctaagcaagtggtgacattatcaaagatctactgagttaagaagaggaggggatgttatttatttgggtcacgttttggcctgccagaggtaggactgaaagacatcttagagatcctatagtccaactgtcttgggttttgttttttttcctccacagaagaggaaacaggttctgagatgtcaatgatcagccccaggtgctctgtgagcttgtgtggagagaggtcctggctgtcccagctcagagctccttcttgggcctcgtagcactggtgtctggactggctgctgccgacccatcctgagggtgtgtgttggtttcctagggtgactcaggaggacccctggtctgcgaggagccctctggccggttctttctggctggcatcgtgagctggggaatcgggtgtgcggaagcccggcgtccaggggtctatgcccgagtcaccaggctacgtgactggatcctggaggccaccaccaaagccagcatgcctctggcccccaccatggctcctgcccctgccgcccccagcacagcctggcccaccagtcctgagagccctgtggtcagcacccccaccaaatcgatgcaggccctcagtaccgtgcctcttgactgggtcaccgttcctaagctacaaggtattttcggggcagaaaggtagaagatgatgtacgtgcctatcttgatttagggagaacggatatcgtcatagtatcttcataattttggatcttcctgttcaaggaaaggtcacatgtgtatccgtttattcccatcttacgttgcgtgtaccctcatggtatctttctgtccacaggtcttgcccatgtcttgttaactatggcgatctatcaatgggatacttttttttttttttgagacgcagtcttgctccgtcgcccaggctggagtgcagtggcgtgatctcggctcactgcaacctccgcctcccaggttcaagtgattctcctgcctcagcctcctgaacagccgggattacaggcacaggccaccacacccggctaatttttgtatttttagtagagacggggtttccccatgttggtcaggctggcctcgaactcctgacttcatcatctgcccacctcagcctcccaaaatgctgggatgacaggtgtgagccaccatgcccggtctggaatactttctattgtattttcaaatagtttgtacccagacaacttgtaggactggcagggtgcggtggctcgtgcctgtcatcgcacactttgggaggcagaggtgggcagatcgcttgaggtcaggagttcaagaccagcctggccaacatggcaaaaccccatctatactaaaaattagctgggcatggtggagggcacctgtaatcccagctacttgggaggctgaggcaggagaatcgcttgaacccaggaagcggaggttgcagtgagctgatacggtgacatggtgccactgcactccagcccgggcaacaagagcacaactccatctcgaaaaagaaaaaagaaaacttgtaggactatatctctgtttccaaaaactgttagttgcattcctatttttttttttttttttttctgagacggagtttcactcttgtcgcccaggctggagtgcagtggtgtgatctcggctcactgcaacctccacctcccggttcaagtgattctcctgcctcagcctcctgaatagctgggattacaggtgcccatcaccatgcttggctaatttttgtatttttagtagagttggggtttcgccatgttggccaggctggtctcgaactcctgacctcaggtgatctgcccgccttggcctcccaaagtgctgggataacaggcatgagccaccgcgcccggccatgcttcatttcagttcacctacaccccacactctgttccgaaaccccctaacaatcgtacccttccttttctcagccgccccatgggtctcctggagtgcagccccgtctttgcaaggaggccataaacctggctttgtgggctgcgggtctgtggtggggtctgttgcggggggtcctcgggctgactgggccgctgtatgtttctttcttaacttctgtccccgaagcgaggccacgaacttgctgcaggaccttgggcaaactacggacaccttgaagcctccacggcttcttgtgtggaacgggagggattgcggcatcttcagggcctggctgcaaccggtgtcctgggaccaccccaccggatgctcccacccgagcaggccaagatccccagacctggtcttgtgtcctccttccagaatgtggggccaggcctgcaatggagaagcccacccgggtcgtgggcgggttcggagctgcctccggggaggtgccctggcaggtcagcctgaaggaagggtcccggcacttctgcggagcaactgtggtgggggaccgctggctgctgtctgccgcccactgcttcaaccagtaaggcccgcctcctccaggaaggctgcccggcttcccctcctcaccagcccctccctgtcagaaaccatcctgctggggctgctgcatggaccccactggggagcagcccttcctctcctgagggcagctgagagacaggagggagccggtgccaaggcttctaaggacaaacagggcctaaccaggggagggggaggagggttccttccccattgcttgctacccaggcagcgtttatcttggagattcccaggcatggtggcccgcatctgtggtcccagctactcaggagcgtgaggcaggagaattgcttgagcccaggaggtcgaggctgcagtgagcctgatggtgccactgcactccatctggggcaacagagcgagaccctgtctcaacaaaaaagagactcataaagctgtagggggttgggggggggcattggcacaggtgtagaaaatgaagcctgagggtcccctgacttgtccgaggtcccccagcttgggatccttttcaggaggagcccagcagcccctctttccctggtcctcctccctggagccgaaggtcagaggatggtcctggggcccaggcagccctgtgtggcttcctgggggtgtgcatcagccctgtccctccccaagaaggcgggcatgtgctggagggcaggcatgtctgagggccctgtctccatagcacgaaggtggagcaggttcgggcccacctgggcactgcgtccctcctgggcctgggcgggagcccggtgaagatcgggctgcggcgggtagtgctgcaccccctctacaaccctggcatcctggacttcgacctggctgtcctggagctggccagccccctggccttcaacaaatacatccagcctgtctgcctgcccctggccatccagaagttccctgtgggccggaagtgcatgatctccggatggggaaatacgcaggaaggaaatggtgagcgctgccccatcgaggggaacggtggatttattctccagggcctggcctggggagggtcaggatgggcatctcttacctggaccctaaaccaattccactgcacagggacctctgtggctgatccctttgtctttggtcccgctgcccacacacctctcacttccccattccatctgggggcaaaatctggctgttgcctgtttgtataaacaaagttttattggaacaggggccatgttcacacatcaacagattgtctatggctgctttcctgcaatagcagcagagttaaatacttgtgacagagactggcccttaaagctgaaaatatttaattctctgaccatttatagaaaatgtttgccggcggccacatgtggtggctcacacctgtaatcccagcactttgggaggcccaggagggtggatcatttgaggtcaggagtttgagatcagcctggccaacatggtgaaaccccgtctctactagaaatacaaaaattagccgggtgtggtgatgcatgcctgtaatcccagctactcgggaggctgaggcaggagaattgcttgaatctgggaggcagaggctgcagtgagctgagattgtgccactgcactccagcctgggtgacagagcgagactcccatctcaaaaaaaaaaaaaaaaatagaaaaataaaaaattagccgagtatggtggcacatgcctgtagtcccagctacttaggaggctgaggcaggagaatcacttgagcctgggagttcaaggccgcagtgagccatgatcatgccactgcactccagcctgggcaacagagcaagaccctgtctcaaaaaacaaaaaaagcaaatgctcactggtgcttgcttgcgctagtctatcccgagacccctcccactccaacagttaatgcttcccttgacctcagaatggcctcctacaccttacccaggtgctagggcggcagccccatggggacagtggggagactcttgcgctctgagcgggccatcaggcccacctcctcctcactctgtggctttgtgagattcctgcaactctgtgagccctggtttcttcgtctgtggggtggggatgctgcatctcggggctgttatcggagcggaactggagctgctctgatgatcactgtgcacgtggcctttctggctctttccctggtagccaccaagcccgagctcctgcagaaggcgtccgtgggcatcatagaccagaaaacctgtagtgtgctctacaacttctccctcacagaccgcatgatctgcgcaggcttcctggaaggcaaagtcgactcctgccaggtaagcattcaaagggggaaagcgggcaatatttccatgaaatgcccacagccgttcacccagcagttctttgtgtgcagacctagatttttttcctttctttccttccccccctccttccctccttgtccttccctccttttcctttcctcctttccttccctccctttccctccctccctccctccctccctttccttccctccctttccctccctccctcccttcccttccctccctccctttccttccctccctggcctttccttccattccttccctccctccctttccttccctccctccccttccctccctccctttccttccctccctccccttccctccctacctttccttccctccctccctccctttccttccctctcctccctcccttcccttccctccctccctttccttccctccctggcctttccttccattccttccctccctccctttccttccctccctccgtttccttccctccctccctccctttccttcccttccctccctacctttcctttccttccctccctccctttccttccctccctccccttccctccctacctttcctttccttccctccctccctttccttccctccctccctttccttccctccctccccttccctccctacctttcctttccttccctccctccctttccttccctccctccgtttccttccctccctccctccctttccttcccttccctccctacctttcctttccttccctccctccctttccttccctcccttcccttccctccctacctttcctttccttccctccctccctttccttccctcccttcccttccctccctacctttcctttccttccctccctccctttccttcccctcccgccctctccttcccttccctcccaccctctccttcccttccctcccgccctctccttcccttccctcccaccgtctccttccctccctccctttccttctcttccctccctccctttccttcccttccctccctacctttccttcctttcctttccttctctctctctctctgtctttctctctgtttctttctttctgacggagtctggctctgtcgcccaggctggagtgcagtggtgcgatcttggctcactgcaacctccgcctcccaggttcaagcgagtctcctgcctcagcctcccgagtagctgggattataggcgcccgccaccatgcccagctaatttttgtatttttagtagagacggggtttcactatgttggccaggatggtctcgatctcctgatgtcgtgatctgcccacctgggcctcccaaagtgctaggattacaggcgtgagccactgtacccagcctagatttctttttctttttccttttttttttttgagatggagtcttactctgtcgcccaggctggagtgtagtggcgtgatctcggctcactgcaacctctgcctcctgggttcaagtgattctcctgcctcagcctctggagtagctgggactacaggcatgtgcctccacgtccagctaatttttgtatttttagtagagacgtggtttcaccatgttggccaggctggtctcgaactcctgacctcaggtgatccgcccgcctcagcctcccaaactgctaggatggcaggcctgagccactgcacccggccatagccaccatgcccagatttctgaagggctcaaccgtgcacacacagacaggttaattttcaggctgggtgcagtgcctcatgcctgtaattccagtgcttcaggaggctgaggtaggatcagtcgaggccaggattgcaagaccagtctggacaacatagtgagaccccgtctctacaaaaatttaaaaaaaaaatttgtcaggcagagtggcaggtgcctgtggtcccagctccttgggcagctgaactgggaggatctcttgaggccaggtgtctaggctgcagtaaactgtgatcacacagctgcactccatcctgggcgacacagcaagaccctatctcaaaaaacgaagggcgggtgcagtggcatgcattttgggaggccgaggcaggcagatcacctgaggtaggcagttcaagactggcctggccaacatggcgaaaccctgtctctactaaaaaactacaagaatttagccaggcatggtggcgggtgctggtaattctagctactccggaggctgaggcaggagaattgcttgagcccaggaggcggaggtcacagtgagccgagatcatgtcactgcactccagcccgggcaacagagtgagactccacctcaaaaaaaaaaaaaaaaaaatggcatcagatttcaatagtaactctcaaagttagatgccattattactaatcaatacaaaatatcaatgacagtgtaaatgcccattcacacacagtagttaaaaggaaggtggtaaataacctgcaatgggaacctacccagcccaagttcttcaatcagacttctgagttcaaatcctgcttcaactactgtgtgaccccaggcaagtgccttaacctctctgggactctgatccccatatgtaaagtgggaagcatagcaatgcctgtcttctaggagtgttgtgagatcggtgtcttgcatagtcttttcttcctatatattcattatatttgttctttatatctgacaataaaaatagaataataggtatttatagtatctattattatactatttattctctatataaatgggcgattcacaatagttagctttttatcttgaaaagaatgttgaggccaggccaggtggctcacatctgtaatcccagcactttaggaggccaaggcgggtggatcatctgaggtcaggagttggagaccagcctggccgacgtggtgaagcccccatctctactaaaaatacaaaaattagccgggcgttgtggcttatgcctgtagttccagctactcgggaggctgaggcaggagaatcacttgaacccaggaggtggaggttgcagtgagccgagatcatcccactgcactctggcctgggcaacaagagcgagactctgcctcaagaaaagaaataagcttggcagctagtggtcaggggctacttctagatggtgggactattcatggctgttattgttgttatttatttatttttttttttgagagggagtcttgttccgttgcccaggctggagtgcagtggtgcgatctcagctcactgcaagctccgcctcccgggttcacgccattctcctgcctcagcctccctagtaggtggaactacaggcgcccaccaccacgcccagctaatttttgtatttttagtagagacggggtttcaccatgttggtcaggctggcctggaactcctgacttcatcatctgcctgcctcagcctcctaaagtgctgggattacaggcgtgagccaccacgcctggccttattgttattatttttagagtttttctgcattgttttacctcctcaaaacaaaagcaagaatgatggaaactcagagaggagaagtgactcactccaggtcacacagccaggcatggggctgcagtcaggtctccagacccgcgctgtgccctctgccccccgccctcgatggctcccacccactgtaggaacgcaggagggtatggcagtgctgggaagagagggtccctggaggaccaaccagtgctctttccttcctttctagggtgactctgggggccccctggcctgcgaggaggcccctggcgtgttttatctggcagggatcgtgagctggggtattggctgcgctcaggttaagaagccgggcgtgtacacgcgcatcaccaggctaaagggctggatcctggagatcatgtcctcccagccccttcccatgtctcccccctcgaccacaaggatgctggccaccaccagccccaggacgacagctggcctcacagtcccgggggccacacccagcagacccacccctggggctgccagcagggtgacgggccaacctgccaactcaaccttatctgccgtgagcaccactgctaggggacagacgccatttccagacgccccggaggccaccacacacacccagctaccaggtaccgggagagacggagggatccctgggagtggagggtcccatgttaatcagcctgggctgcctaacaagacataacgtcgtccactttgggaggccgaggcgggcggatcaagaggtcaggagatcgagaccatcctggcgaacacggtgaaaccttgtctctactaaaaaaatacaaaaaattagccaggcgtggtggtgggcgcctgtagtcccaactacgcgggaggctaaggcaggagaatggcatgaagccgggaggcggagcttgcagtgagctgcatgccactgcactccagcctggcaacaagcgaaactccgtctcaaaaaagaaaaagacataacggcctctctggctgggcgcggtggctcatgcctgtaatcccagcactttgggaggccaaggcgggtggatcgccagaggtcaggagttccagaccagcctggccaacatggtgaaaccccatctctacaaaaaaataaataaaaaaagccaggcatggtgacaggtgcctgtaatcccagctacttgggaggctgaggcaggagaatcgcttgaacccaggaggtggaggttgcagtgagccgagatcgtgccattgcactccagcctgggcaacagagtgagactccagctagataatagtaataaaaataaaaagccaggcgtgatggtgcatgcctgtggttccagctactggggaggctgagacaggagaatcatttgagctcaggaagcagaggctgcagtgagccgagatcatgccattatactccagcctgggtgacacagcctgtctctaaaaaaattaaaaaaaaaaaaaaaaatgaaagcagggactttgatggttcacagctgtgccatgtccttgggtgcgtgtttcttgctaacttggcagctgccctcatgtaggtctgtccctgcagcctgggggctctcactttctcagtctcagctgattttgactttttcaatagctatggcgtgggatctctttgggcccaaaagaggtggagaaggcccccctcaaaatacaggcgggttctgtgtggaggtagctggtgttcccaaggacagcggctgcggctgctgtcagattatccaaggccacctggtcttatgtcagggccagacggtgccaaggctggtggggaactggcatttccccttactggccttggtagctgctgcgggttggatggcggttggtggggggtggggggcgggggggacccagggaagccagctgggtggtgatagagggcggcgggggggcttgcccctgaggaggaaaacacgcctctggagacagcaggtgggtatgggaccccctccatgggtggtaacagggtccctgaaaccccctggaaaccacccacgtgttctttccacagctgggttctgaggaaggcctttgcgcttggcaccgtctggggagggcttggaggtgatcagggatccaggcagagggcaccaaggcagggctggggcctctggggcggggccctggtgtgtgcaaaggccttggggtgggagggaactcctggaagacggagatgtgggaggctgccatgagaggggcctccggcaggggaaacgtatggtcccaaaactgaagtcataggaaacaaatgcatttccaatgttatttgagaaaagcccaaagaccaagcagcaggcccagtgtcctttcctgctgagttttcctgggataggtcccccatcacaacctactccctggggctcccagggggattcgtggagaggcggcgcccaggggggccttcgtggaggaggtgccctgggtccgcctgcccacgcgcctggctcccccgcagactgtggcctggcgccggccgcgctcaccaggattgtgggcggcagcgcagcgggccgtggggagtggccgtggcaggtgagcctgtggctgcggcgccgggaacaccgttgcggggccgtgctggtggcagagaggtggctgctgtcggcggcgcactgcttcgacgtgtgagttccaaacgctccaaatgcccctacatgtctctgtagctcacccggaaccgaactgttgcccgaaaacgcaccctgaccccctcctttgccgggagtgccctccccaaccccggctcccactgccccaggccactcctcccaccccccatctccccatcctcgctccctgcagccctcccctgaccacccaccccctagcctgaccacacggggctggggctgcgaaggccgagtcctaccccgcggtccccacctaacccggaagctgcggccccccccctccagctccaggctaagcccacgggaacattggggtcacttctttccccagccctcgcccctgggacttggctccagccccccaaagcccacccagtagaaagctgccctccccagggcccaagccctggcagtcgaggggtccggttttccagaggggacacccagctctgggctctgcagggctggaggtcagaaggggagggcaggcggggggcgggactcgcacggccactagaccccttttcagagcgctcatattaggtggtgacggctgcagttcccggtgccgcctcggtgcctgatgggggagactgagcccattcccagaccgacagccagagaccaagaggccaataaccctgcccagggtgccagccggccgctgggggacaccacaggggcgggggccgggggcgtgggggctcgggccgacgcctgtcctcgcgcgccccgcagctacggggaccccaagcagtgggcggccttcctaggcacgccgttcctgagcggcgcggaggggcagctggagcgcgtggcgcgcatctacaagcacccgttctacaatctctacacgctcgactacgacgtggcgctgctggagctggcggggccggtgcgtcgcagccgcctggtgcgtcccatctgcctgcccgagcccgcgccgcgacccccggacggcacgcgctgcgtcatcaccggctggggctcggtgcgcgaaggaggtaggcgcgcccggggccgcggtggtgcggggctcggggggcggccggacgcggtccccacccgccccgtctcgctcgcccgcccgcaggctccatggcgcggcagctgcagaaggcggccgtgcgcctcctcagcgagcagacctgccgccgcttctacccagtgcagatcagcagccgcatgctgtgtgccggcttcccgcagggtggcgtggacagctgctcggtgagccccgccccggcccaggggaccaggtcccgcccagccgccggggagggcgggttcccgctgccacgaagcccaccatccgggagccaccctccggtgcaggcttctccagcggatcaagcagggagcctttttggctctggaggaatttccactccacagccgtttattgggcaacccaccgcatcccatccccgggcctcggcggcagagcaggcagaggctgcagtgggaggcaccgttccactccgggaccacgtggcgggtgtccataaatgtctgccacctttgcattgagcccattttccagatagtgaaaatgcggctcccaggggaagtcactagggtcactcctagaggggccaatgacccaagggctgctgtaggggaggtaccggcctctgaaccccctttcttctctccccaacagggtgacgctgggggacccctggcctgcagggagccctctggacggtgggtgctaactggggtcactagctggggctatggctgtggccggccccacttcccaggtgtctatacccgggtggcagctgtgagaggctggataggacagcacatccaggagtgaccaccacgtgactgcccaggccgagactctacgtgaaagcaacaggagcagcaggccacccaacaccccaccccaccgtaccctacccaaggacgggtgtgggggggctgtgggtcatggggatgcattttggtaccaccctttgttccaataaacacagcccctccaccctagctcactggctcagcacctcagtgtcacagcgaggaccacctgcctggtgctccaccaggacccggggtggaacgaagcagggtcaaagcaagccctgacaaggggaaggctgtcccccttagcctttggggcaggggtggcagcagcaacacattcctcgtgactcagcagcccggtggcactaaggggaaagatggacttctcccaacccaggggaggctgagaccctccgagctggggttccagggacacgcgtcacctcttcccagagacccctcaggagggaaataaagaggtttctctccgtcctccaccaatttatttgcccatccgcaggaggtgacagctcctgtggtgtctgaccacccccaactccgaagtccagacaagctgtccgcccagaatatgaggctgacttgggcacactaggggaataccccaaaggcctgaaggaggtgccactgggctgccagcacttcaggaaggcacagggccccacacccccgagatccaagctgcactggctggcagggggcagggcggggggtggcgaggacacagtcccgtgtgtcccagcaccggtgccaccctcctaagccccgggcaggcagtacgtacatgcggaccccgcctctcaaagcacgtttatggaaatgaacagggtggggtggcccgcgctcgccggtcacatgttggctcgttcccgctgcagccgcgagttgtaggcgcgagacacggtgttccaggcgtccatgtagcggtccatgcacatggcgatgcacttctgcgggagcggaggggcgcacggctcagctcgggacttcgcggccccggggaccgccctgaccccggctccaggacgcccgggctgcagactacgcacgtgcagtgaccactccgtcgcacctccccgttagtctgcgcacgcgcagacacctcccccctcgaatctaggccctcgcgacccttgccccgaacctccgcgggtctcacctgctcggagttgtccagggagcccccaggtttccctatacacttccggaaacacttgtccgtcatcctctgtggagacacgcgaggctttagccgcgacgtcggcccccaggggtggccctgtcgcccccagcgcccgtccccggccagccccgcacctgcagcagctcctgcgcgttggccacggcgatctgcactttcacctgctccattatgagccctgggtccagcttcccgctgccggagcccccgaaatcggagccgaagccgccctccatggctccgcaaagtcaaccggaccgaggccgcgtgcgccgactcgtaactaactgcgccggaagcgggccgcccggggcaccacgggaaacggagtccgcgcggacggggacggaggactacaactcccacacgaccgcgcgcgcccgggccattcaaggtcgcgcggggggccctccgctcatgcggaggcctggacctgccgttacctacacgagctacccgtggttgcgactccgcgggaagagggaggccctgacttggccggggagtaggggggctactacgtgcggccgaggccgatcactttgtactcacgctctgcctccagctcgtcccgaagggcctgccgcgcatgcgcacgaggcacccggcgcgtctatacagcgtgttgccgccggggcggagcccggtcgcatcacgtgacgaagagtcagcttgtgcaacagcgtcggaggctcactagaaaaaaaagggcagggtcccatgcatcgcctgggtcctgtttacactagctacactagccagtgacctttttccttgggggtggagggatctttcttagacatccgcttcattagggcagaggccccggctcgagcttcccctcaggaataaactcagaggcagaacctaaaatcaaaatgtttattggagtgttgtacaaaaaagtttccagtcataaaatgtatattacaaatcattggaaaaaaaaaagaacacattaggcatgcatcttcttaaaaaccgaatctctgaaatgaaagtccatgccagccccagctgcagcccagctccgtttttgcaggttgtgctgtgacgctcgctggacgcagggcttggaagaggctgcaggcggcgacgccccaggactgaggagtccctcagatctttaacaaagaactgccgcgtgcaggcttcagaccaaccccagccaaagccgctggcatgaggacaggtgcatgatcggattctgggtcagcccgcaggcctcccggctcctgggctcagcggggcaggcttcagcgttaacctggcgctgtgcaccccagaacccgcgttggtccagcaggcgtgggcctccccccagggctgggtggcgtctgatgcttcgcagggagggcgctaggcttcgagtcacacggcacgggcttacacagagggatggtttcgcatcgttctaagcggcacacagctaagcgtatttggggacaaatgcaaattgtttcccaggccataaataacttttaaaaatttgattttcttagtgtttccaaagactcaattctcaatgaacctccaattacccacaggctgcccagtccacgcttctccccacccccttcagctaagggcacccgcagtcctaggaccacccccagctccacccaaggcaaatgtagggtggggggttctgtgggcctggggcgtgctgttttcaggacaggactgggcagcgtctggacatgaggacctgcgggttttgggggggactttgtccctgagcccagcctgcaaggctgtcggcaaatcacagaccaactccaggatacagctttgctcctccagagccaaaatacataggatgtggctgagaccactgcagactccccataggacaagatcaccaagacccacccccagaaccctcgctagcacgaagcccagccagtcgggtccgggtgattcctgctatgaaggtgggaaagaggacacagtctgtcgccagcattcccacttccagcggctggcagagggtatccccggggcaggcaaagctccctaccagccgcctgactgggagcacagcggcgtagcctccaggaggaaatgctttggtaagatgcgcccccctctatctacatgggaccgggacttctgagagcaaggacagcgagcaggggctacgtggagcagcgggtgtttctgctttgtcggccgctggctccttcccggcctggggctggggccccccattccttcctgccacaggcaggtccccagggaggcgggatgcagtcacaggggagcggtgccgcccccgccctgcagtgaacgccatggcccggagacggcgcgtgcccatggctcagttttggtgtctttaagacttgagctgcactttctgaaggaggctctgccgtcggagggtgccccagccccacgccaccccggggaggagggtcagcctgtcctcaaggccctggcgtgagctcctgacctgtgtactgaccaatgtaaaaaaataaatatccattaaaaaaataacttctgtgtatctatgagggagggtgtaaacggtgagctattgccgaaggggggtgccaggcattgggaagctggactgaggggcttgggtgcgtcgtgataggagtcaggtggccttggcctgtctgagaaacatggtttcagcgagaaaatcacagataaaagcacagtatggatagacgcatgtgtatatataggcacagggcagacggagctggaacacgggaggggctccacagcgctctcctccagagggtcaacatggtggcgttccctgcagacagctgttctgaaactcacagcttctgcctccaaggcaaccagatgtgtcccctccacatctcccctccctgcttattgttgtgacaggtcttacgacgggactgtcctcattcttccttccccaggtcttcccctcccctgccctgttggccttgcacagtcaggaactgaactgcgggaaaactcccccaaataaagtcaacggtccgagaaacccggccggtgcgctgccagaacgggaatctggaagcccaggcagcggagtgaaaacccgccctgggggccacgccatccccatgctggcccacacccgctgcgtggctgcctgaggagttcccgctgtccgaagctgggcagccagaatgcaggcttggccccgggccccaccaggtcgacgcctggattctgaatttggttttgtagaaagccttaaaaaaacccaccaccactgaattcctacgcagtttccgcgctccgtccgcagcagggccgtctcctgtcccctcgctagcctcgccggccctcctccctccaagcccaagcatcttctaaacctccgggtcctggccctgggcttccaatttgaccaaatggtgagatgaggagtggggtgggattgaaaagtctccggggcagcggcgaagtggcagcgaagtgaggctggaggagacccgccaggagggagggctgggggagacccacccacacgttctggcagttcgcttagaaattctctagaaatgtatcaagaactaaagaaagccaatgatataaaaatagttttcagtggctctgggtaaagaaaggtgtgtggatgaggagtgtgggttcacatcacgtagcagcctcttgaggtggtcctcgggtccccctgcaggaaggaaggaaggaaggtcggccatgatcagggccagcctggaggcagccggcaggtagatggctgcccccacctccccaccagggaggggctgagcaacaacagtgtctatttctagagccttccattccacttccatgtccccatgagcccgcctgtgagctacacattctgttctgggttccaaaacagtcacaggaacttgcgacgcacgcgtttaatgcagctgtggtttctgcactcatcttctccccagaagccagtattgaagggacctgtgtcttcgactgaggaagccggttgaccagagagcatttggggagctgttcaacacccacctctcaggggaccccctggccagctaccctgaggtctgtgatgtcgcaaattcacacgatgggcacgacccaggaggcaagaacaggtctctgccgtgctggtaacagccaaggctggcttcaccctgagccacggcagccagatggagctcccgtcggggatgcggccagcacgcatgtgtatgtgtgtgcacgagctcactctgccccagaggctgccccccagccgcaagtgggcacaggggtcctacctgttggtggaaaagatcctcctcgccaaactcggcttcctcctcctcttcctccccattctcattctcacgcatcaccgaggacttcttcacagtcctcatggccacttcctgtgcgggacaggacacggcggcatgtcccgggatcgggcccagagctgctgtggcggccccgagggtgcccagaccctgcccaggactccagccgagcaccccccaagccacacacacccacctcgccatccgcgttaaccaggacggtgcggaagctctcgcccgtgccccagctgctctggcccttccacaccagcgtcgagggggggctgtgggccacccccgcaccagctgcccacacctgaggacccaataacaatggccccatcagggtcacctctggttccagggacgtgggccagccagtggcccctaccacaaagcccccttcaatgccctgggcgttcagtccttccagcccgacgcaggcttatccagggtgatggtccccaggatacacaagaagagaccagggttcacagaggccaagggctcttggcaagcaggggctgaactgggatctgacacccaccaggctccatggcccatgcgcctgactgttaacacttcacggggacgcctgccagccccagcagcctggactcagacccagggcacaccactcaggctccagggaggcccagtggggtgacaccagcacatggaggttctatgactgcggcagccgctctgagacggtgcctggtgccaccatcatccccacccacccccgccaagtcctgtgcctccagtcccctgaccccacctcacaccccatccgtggccaccctcgccctcctgccccaccacctaccgtgaccatctggccggcgcgcaggatgtacttgggcgtgaacttgtaggcgatctcctccccctccaagacctgcctcttgattctccagttccccagagactgatcctggaagacacggcacacacctgaccctcagccaccaggactgtgacaccgcccccatcgccctggctggtggccccatcaccctgaccctggtcacccccaccagctaggtcaccccattacccccatgccctggtcattccagtcaccttgtcccctgcctcgtcctgaccggcggccctgtcaccctgaccctggtcacccccatcagctaggtcactccattacccctgtgccccggtctttccagtcatcttgtcccctgcctcgcattggccggcagccccgtcaccctgaccctggtcaccccatcagctgggtcaccccgttacccccatgccccggtctttccggtcaccttgtcccctgcctcgcattggccggcggccccgtcaccctgaccctggtcaccccatcagctgggtcaccccgttacccccatgccccggtctttccggtcaccttgtcccctgcctcgcattggccggcggccccgtcaccctgaccctgatcacccccatcagctgggtcaccccgttacccccatgccccggtcattccagtcaccttgtcccctgcctcgcattggccggcggccccgtcaccctgatcctggtcacccccatcagctgggtcaccccgttacccccatgccccggtctttccggtcaccttgtcccctgcctcgtattggccggcggccccgtcaccctgaccctgatcacccccatcagctgggtcaccccgttacccccatgccccggtcattccggtcaccttgtcccctgcctcgtattggccggcggccccgtcaccctgaccctgatcacccccatcagctgggtcaccccgttacccccatgccccagtcattccggtcaccttgtcccctgcctcgcattggccgacagccccgtcaccctgaccctggtcacccccatcagctgggtcaccccgttacccccatgccccggtcattccggtcaccttgtcccctgcctcgcattggccgacggccccgtcaccctgaccctggtcacccccatcagctgggtcaccccgttacccccatgccccggtcattccggtcaccttgtcccctgcctcgtattggccggcggccccgtcaccctgaccctgatcacccccatcagctgggtcaccccgttacccccatgccccggtcattccggtcaccttgtcccctgcctcgcattggccggcagccccgtcaccctgaccctggtcacccccatcagctgggtcaccccgttacccccatgccccggtctttccggtcaccttgtccgagttgttcttgagctgcacaaacttgccctccaggtcgatctcctcgatgctgacgctacccgaggccgaggcctgctgggccaggtggaagccaccgctgccacccgtgcccgtgcccaggacgcttgggccgctgcccaagggctcctccacctccagccgcttccgcttactgcggcccaggcgcccggtggcggacaagctgccgctgctgctcgaggtggctcgtgagacggtgacgcgcgaggatgggctgggggacagcttcagcctgtggggaaggcaaggaaggtgggactggtagtgggagccccagacagcccagggcacgcagagtggcggccacggcccggccccacctccacccctgcccagcactccccgcagccccgtcccgcctctcctcctgccctgcccctcctcctcactctgtgctcccaagcctcctggcctgccgcacctctcctcctcgccctccaggagcttccggtaggcgttgatctccatgtccagggccagcttcacgtccagcagctcctggtactcggccagctgctgctgcatcacgtcccgcatctccgtcatctcctgctccttggcgtccagcatcttccggaacttgtcccgctccccggccatggcctcctccagctcccgaatgcgatcttcagcggcactggcctgcggagggggcgggtggcgaaggtcagggcagcccatgggtcacaaggcccaggtgatcctgggactgcgggagatgggccctcaccacagactggggcagagaccaggcctgggcatggggcgcacgggaggggagggaaggggcatcgctgggcgccccgagggctgcatccgatgccaagaggccagagccccacgccccgcacatccagggcagggcccagaagttgggccagggggacggcagacggtggcgctgtgctcatcacctgcttctggaggccggagagctggtagctgagggactccaggcgcatgcgggcctccttcagctcctcgcgagccgcactggccgccttgtcgttctggtcagagctcagcttggcgctgtccagctgtggggagacgggcgggtgagtgcgggcgcggggcggggcggggttcccaccggccgcccccgcccacccgcctgccggccacaccttggcctggtaggtctgctccagctccagcttgtagagccgcacttgctcgtcgtgctggctccgcagctcctccagcgcctgtgccatcttgaagtcgtactcctgctgccggctgctgtccacctccaccaggcgccgctcgtgccgccgccgcgtctcccgcacctcctgcggaccaaggcttcgtgaccctctggtcccgcctgggccccaagcaccaggcccaagggagggctcaaaaatgtgccaagaggaacctccaggcaattcctggttccttgtgcacaagttacaaaccgatacacgtgcaggtgagaggcgacccaggggccgtccacgcgctagaacgtgactcagccacgaaaaggagcgaggctctgacaccgccacagcatggatgcaccttgaggacgtcacactcaatgagagacgccagacacaaaaggccacacggtgcgtgatcccatttccatgaaatgtcctgaaatgtccaggacaggcccatccacagagacagggaggggatgcgtgggggccagggctggggactgctgatggggagggggttctttttgggtgatggaatgttctagaattagaggtggtggttgcacaaccctgtggagatcctgccaatgctgaactgtacactttaaaaaggtggacttaaaatagccaggtgtggtggcgggcacctgtggtcccagctactcaggaggctgagacaagagaatcgcttgaccttgggaggttgcagtgagccaggatcgcaccattgcactccaacctgggtaacaaagtgagactgcgtctcaaaaaaaaaaaaagtgactctctcttataaaagccattattgaagaaagcgggccaggcgtggtggctcatgcctgtaatcccagcactttgggaggctgaggcaggcagatcacgaggtcaggagttcgagaccagcctagccaacatggtgaaaccccatctctattaaaaatacaaaaattaggccgggcacagtggctcaagcctgtaatcccagcactttgggaggctaagacaggtggatcatgaggtcagaagttcaagaccagcctgacaaacatggtgaaaaccccgtctgtactaaaaatacaaaaattagtcgggttggtggcacccgcctataatcccagctactcaggaggctgaggcaggagaatcgcttgaacccaggaggcggaggttgcagtgagctgagatcatgccaccgtactccagcctgggtgacagagcaagactccgtctcaaaagaaaaaaattagctgggtgtggtgctgtgcacctataatcccagctactcgggaggctgggcccagtgtgggcaacagagcaagactccatctcaaaaacaaaacaaaacaaaacaaaacaaaacaaaaacagtagaaacgcttctgaaggaagctggccacctttgcagtcagcaaggcgggtagcccaggcaagcagagccctgcgggccgcgcacccacctccacggccgccctcccgcctccacggccgcgcacccgcctgcacagccgccctcccgccttcacggctgcgcacccacctccacggccgctcacccacctgcactgccgccctcccacccccacagccgcgcacccacctccacggccgccctctcgcctccacggccaccctcccgccaccacggccgcgcacccacctccacggccgccctcccgccaccacagccgcgcacccacctccacggccgcccttccgcccccacggccgccctctccaggactccgcaccctgtgggctgcacaggcctgcatcatcaagctccctaccgcagctccctgtgagggcccctccagggcctcttcccggcccctgcaccgccttcgtgggtcttttcccaggtgccctgtgggttccacctggggcacgttcctgggcccccgcacagaagctctcgtgagtctcttcacgggctgtctcacaggtttccccacaggccccttcacaactgccctggcggcctcccctctggctcctgtggggccccccccactccctgggcctggccagagcggggcgcagctcctgagcggcctggacatccctccaccagcagccagcagctctccctgggcagggagtgtgggcccggccggccccggcattccaccctgcactgtgacagcacaattggttctaaaggacacaggctgacgcctttcctccccactcccctctccgagcccccggaggcagaggccccaggtgaggggctgcaggtcagggaaggaggctgggtggggagagcgggcctcaccctcgctttggacaaggaggccctgtgggaggctggacggtggcacccagaagatgcacctgacgcctgcctcatggtctagcagttaggatcccaggcggccagggttcagctctcagggtgggaacaccaagcttttagaaaggcaagaaatcaaaatagaccttccttgacactgaagagatatgttttggctgggcatggtgactcacgcctggaatcccagcagtttgggaggccgaggcggatgaagcacctgaggtcaggagttcgagaccagcctggccaacgtggtgaaacctcgtctctactaaaaatacataaattacctgggcatggtggtgcacgcctataatccagctactcgggaggctgaggcaggagaattgcttgaacctgggaggcggaggttgcagtgagccaagatcgtgccaccgcactccagcatgggtgacagagtgaaactccatctcaaaaaaagacgtgcccacatcccgatccccagcagctgtgaatggaccttatttggaaatggggtctctgcagatgccattaggtcactctggatgatccaggcaggccccaaatccaatgacaagtgtccttgtaggatacacagagtatggacacaggggaggcagccgcgggaagacagaggcagacactggggagacgcagccgaagccaagggcaccctaagaggcaggaaggagcctccctagagccgtgggagggaccccggccacacggtgccctcaggcttccgccctccacagccatgagggtggactttgcgtttccgctgtgccaggctggaggccaggccactcactcacctcctcgaacacactcttccggaagtccagctcctcctgcaggctctggcagcggttctccaggtccacacgcatcagcgtctccttctccagctgctttttggccactgcatgaccgtcctcggcctgggagacacaggacagcgagctggtgtgacaatctgtctgttgcatataccctgctggggcgtcccgtggctcctggcacctaccttggccagctgggcccgcagctcagccacgtcactctccaggccgcgcttgtcgctgagggcagctgccagctccacctcgctccggtggaacagggactccaggtccttcacacggccctgggccaccgtaagctcgccctccctcttcttggcgctgaaagtcaagagggcaagtgagtggggaggggcaaggtccatggggccacagggagcacctcagggggcgtcaggcaagcccaaagacaaggtcaccgaggcctccgagccccagaccttcccgtcctgcagacgacgcggccccacgcgcccaggcaaaggcacacgtgccctcatcatctgccctgcactgtcaggagtccagcaagtgacaggcaccagcgcttgggaccaccctggaggcatgggctttcccagcctctcctgcctgttctggacccaggacgaccatttggggagaaattaatgcatcctctgtaaatgttacaaagaccctggcctttgaagggtcagccttgtttgtaaacttaagctgtctgaagcaggctcacctggttttccactaaaccaaattagctccaacattagatatttaagatagcaaatactcaggctttttaaacacacaaatactaccagtgtggattgtaggcacttaagcttttttttttttttttttttttttttttttaagagacaggggttcacttgtttgcacaggctggtctcgaactcctgggctcaaggaatcctcctgtctcagcctcccaaagtgctgggattacaggtgcgagccaccgcgtacggctgactcttaaatgtttttaagcataattataagtcttggagctgaattttaccccctcccgacagggaactaactatatcctcccaagaaacagtgaggacacccagggttccgcagcgtcacaactgctgacatctggggtggtcttgagtgagggcacccagggttctgcagcgtcacaactgctgacatttggggtggtcgagtgaggacatccagggttccgcagcgtcacaactgctgacatttggggtggtcctaggcactgcagggtgctgagcactgtccctggcctccacccacttcagaccaggagcttcttgctgcccagttttgacaaccacaagtgtccccaggaatcacccagtgtcccctggggacagaatcaccccaggatggggacaactgggtgtatctggaataacacagccaaggctgctggctggacattcaaagaacatccacatccaggcggctcgagcccgtggccagaggtcagaagtgacagggacctctcctgcccagcagaatgcactcccgactctccctagagcctttttttttttttgagttggagtttcgctcttgttgcccaggctggattgcaatggcgtgatctcggctcactgcaacctccgcctcccgggttcaaacaattctcctgcctcagcctcctgtgtagctgggattacaggcatgcgccaccagcgtccgctaattttttatttttagtagagatggggtttctccatgttggccaggctggtctcgaactcccaacctcaggtgatctgcccgcctcggcctccaaagtgctgggattacaggcgtgaaccactgcgcctggtcccccagggcctttcaaaagaccacctaggcatttgcccaagaaatgaaagtgacccatagctgaaagtgaccgtatgtctgtctaagtatatctccatcaataactgtatttatctatataatctatgtccgtatatatcaattctacagatggctgtatctttttttttttttttgagatggagtttcgctcttgttgcccaggctggagtgcaatggtgcgatctcggttcactgcaacctccacctcccgggttcaagcgattctcctccctcagcctcccaagtagctgagattacaggcaagtgccagcacgcccagataattttgtatttttagtagagacggggtttctccatgttggttagcctggtcttgaactcccatcctcaagtgatctgtccgccttggcctcccaaagtgctgggattacaggcatgagccaccgcacccagccttacagatagctatatctatctattgctctatctattactgtctatccatctacccatcatccatccatccatccacccatcatccatccatccatccactcatctgtccatctatccatccacccatcatccatccatccatctactcatccatccatcatctatccatcatctccatccatccatccttccatccatccctcaatcatctatccattcatccatctactcatccatccatccatccatctatccactcatccatccatcatctatctatccattatctatccatcatccatccatctactcatccatccatcatccgtccacccatccagccatccatccatcatccacccatctccctctctctctcactagctgccaagctctcactctctgtgggactcttccttccttccttgtgtgacccggggagggagggctgccttcccagctcacagtgccctccctgcctaggatccgtaataaatcttcaaacttgtttcctatcgctgtgctgaatttgcgccttctgtcagaagaaccaggagctgccccaggctgggatcccagtgccagagcgatggtcggacaggcataccctggacacaggtcagacacgagctacggggcagccactgtgtaaacaggtctctcgtgtgaggggtccctggtcgggggtcagacaaccaggtctaaggccacctgccaggtaaaagcatccgtgccgggtaccctgaatcccgggtctggctccggttgtgtcccgccagggcagggcggccagccgctctggcgctggacctggtgtagccagggctctccacacactagaggtgtggcatctgcttgcttttgagaggcgtgaaggccagagacttcggccacaaggctgatgcacccctgtccgcagccctcagggacactaagctctacttccccacatggagcagatctccagcagggtctggggtgcagatcccgcatctctgagcacatgccacacaggccaggccctttcgctcagagggctgcgagccctgcggccctgctggggatttttgcaggggtttgggggaaggtggaatctgttgggcaaatcccgagtgcccgctgtgtggaaggcaccgctctcacaccagaggtgcatctagaacccttgccttacactgcgggacgtccttgcggagggaggcatcagcgacacaggctgcctaccagacaggaggttgcctgggggcagggctggagtggggctgggagacaaccctgggggcagagacctgaaggagcagtgctggaggagccagggccaccgctgctgaaagagccttccaggcaggcgagcagcagtgcaaaggcccaggggtgaggtggaagaggcaggctgcagaccagctcagaggactggagcggagatcggggaatccgggaagctcctcagcaactcggtctaaaccacagggttccgcaggactgcagggcacacccagaaggcagggtgcgggctcccagggctcagacccgtttcctaagcgccaggtgctgagttagaatcttcagctgggtgcccggggttttgtggcaggctctggcttgttaggtcctgcacgctgctcccagtgtttctctcattgtggggttttggagataaatttgttaggataagaaaaacattaggcttggcccagtggctcatacctatacccagtgctttgggaggctgaggtgggaggatcactttagcctgggagttgaagaccagcttgagcaacatagcgagacctcatctctacaaataataaaaaaattaggccaggcatggtggtttacatctgtaatcccagcactctgggaggccaaggcgggtggatcgcttaagtccaggagtttgagaccagcctggccaacttggtaaaaaaattagctgggcaaggtggtgtgagcctctaatcccaactattcaggaggctgaggcaggagaatcgtttgaatttgggaggtggatgttgcagtgagccgagattgcaccactgcactccagcctgggtgacagagcaagactatgtctcaaaaggaaataaataaaaaataaaaaaaattagttgggtgtagtggtgcatgcctggggtcccagctactcggggtggggctgaggcaggatcacctgagcctgggagttcgaggctgcagcgagctatgattgtgccactgagctccagcctaggcaacagagaccctgtcttaatgaaaaggaaaagacgggcctctctgtagatgccacgcactgctcaggagattgtgaactgggaattcctcaacacctagggcgggcactgtgtaccattttctttttttaatgttttaatttgaggtgaaattcacatcctgtacatttcaacatcttaaagtgaacagttgagaggcgcctggtgcggggccagcagcagctctgtcccatctgcacggtgtagttctgacatttcagagctccgtgcacccctgaccaagctctagtcatcccacagcctgcatggctccactgatgaacctgcttattaaacacggtgggtgctggaggtagacagcacagagctgctgcctgagcaggtcccggggtgcacctgtgctgtgtgggatgtgctgagagtgggcagcctgtcctggctggtgcctggccccagggtccccggctcatggccaccatcagggcacaaatggtccctcctggagccccaggccccgggcaggcgggcggtggtccctgggctgacctggagggtctcctgttggggaagggaagtcagctctccacgggagcagcgccagcccaggaaggaggagggcgtcggatggagaggtcacctgcaaccacgcatgggggccccggcactgttggacacagggtccccggtcattcctctggccacactccaactcagggacaacgtggattctcaagccactggctgctgtcacccccgtaccaggtggccgaggtgccacccctcctgccagcagatccctccatgctgagccaggcctgcgtggctctgggagaatgagcagtgtgggaagaccctgacccaccccagcctgaggaaatccgaggcacctgcaggtgcctgaatgccggtggccggagaccacggaagacagtgtccacacgcagggcaccagagacctcgctctagctggagcctcacatcaagaaaagccttgagctcagtgtttcattggcctcctggctcctctgaataaatattccttttgtcatcatcgttctgtttaaattgccgcccaaccacatcccacgcccagaatcaggcaagactcactgccaggctgagaggggagatcgtttctgccgatggacacagttgtcacccagaaggactttgcagccaaccctggggcagcccaacaacccatgagcaccctggtcacacaccacacacccgagcgtcccaacagctgggacaaaaccccggcaccaagaacatccaaccacagggaaatgcctacgatggggcctgaggtcaaacgcgtctcacggtgtccactgggtgccgcccggggtctaggtaagcatgtgcaagcgcgtgtgcacactaaggagacaggccaggctgaccaggaagccctctctggggaggctcgcgggagattttacttgtgagcttaagctgccctgcgcttcctgctgtccgatgtgagcatctatcactttcctcagaacagaaaaagtgacgtggcagccactggtgggggagagaggatgggagctgtgagctccaggctgtgcccgtatcagagcatgccccgcacgagcccagcgcccacctgcccccgtccaccccgtggtgccaggatcagggtgacgtcgtgcccagccgtgaccactcacctcttgttgacctcgtccaactctgccctcagcttcccaatctctatctgcagccgggcacgctctcgagccgtctcatccaggactctccgggcatcggccagctccgactcgtacagcgccttgatgccactcacctggggagacccaggacagggtgaagcgagagggacccttccccttggactacagcagtcagggggcccggccactggccctgctcagattcccagggactggcacgcagagagagaggatggcagcctggggacactgggacaccctgtgttgcccatctcacagacacagcaaagggagccccctgtcggggagggtccggtaaccaggaggaagccaggcgaccctgggtcccagccatcccaggagcctcctcctctgctgcggccccctctggaatgatcgtctctccacgagctccagctcccagaacagcggcgcccagtgctggagaccaaaggccctgggcctggaccagcacagcagctggatggagcctgtccccttccccggaggaccagccacacctggacatgcagccccttggccgctgtcatagcgacacgatgcctggccattagatgcatttttcacactctcggtttcagaaccagaaaactggtgggatgtttaatcaaggatctctcccgctgggcaccatggacactgggctgatcactctcggacaactggtgatgacagcaacccggggccctcccagaccccactgggcctgagagccccctgcccccaccagcctttgcaacctggagtcccctcccagacccctctgggcccctgagactccccccaggcctctgcaacctggagcccccgctcccccagaccccgctgagcccaagatcccccacttctgccaaccgggggccagcccgtgcccctctgtgcccctacctcacacgcaggcacatggcccaggctcaggctgggctgttccctgggatggagggaggagcatctggccttcccatgctgtgtccccccgacaggccagctgccaatgtggtggctcggaggctccaggacagaagctcccacccctcaatcacagagatctgcagtcagagtccccagctccccaccccaccagcggcccccacctttcacccctcgatcacagggatctgtagtcagagtccccaactccccaccccaccagcggcccccacctttcacccctcgatcacagggatctgcagtcagagtccccagctccctaccccaccagcggcccccacctttcacccctcgatcacagggatctgcagtcagagtccccagctccccaccccaccagcggcccccacgtttcacccctcgatcacagggatctgcagtcagagtccccagctccccaccccaccagcggcccccacctttcacccctcgatcacagcgatctgtagtcagagtccccaactccccaccccaccagccgcccccacctttcacccctcgatcacagggatctgtagtcagtccccagctgccccccccaaccagccgcccccacctttcacccgtcgatcacagggatctgtagtcagagtccccaactccccaccccaccagctgcccccacctttcacccctcaatcacagggatctgtagtcagagtccccaactccccaccccaccagccgcccccacctttcacccctcgatcacagggatctgtagtcagtccccagctgccccccccaccagtcacccccacctttcacccctcgatcacagggatctgtagtcagagtctccagctccccaccccaccagcggcccccacctttcccgacggagacccagcccagccagcaaggacatggggaggggctggagagccaggggtcaccagggcaggcagaagcgactggaacaccctctgggccgcccagctaaagaaagcccctccctaagccccgcgcaaagcccccaaacccgcccctctcgagggcctccaggtgaactcgaggcacatgcggtgccagggaaggcgacctcttcacttcctactaatcctgctgcaaccacagccgccacctgcccggcctctgcacgcgccagctgggggcacagctcaggcttctagtggccttcctgcctcccctcctcccacagggccatgcactcagtgagtttaaaaatatgtggaagcaaaccgcagtgagatgccacttcgcaccagccagggcgtccgtcaagaagacagacagtcgcaggtgcgggcgagtacgcagagaaatcggaacctcacaggcagcggcaggaacctgagctgagacagctctacagaaaacagtccaggggctcccccaagagtcacagagccaccctgtgacccggtaactccactcctgggtgtggacccagaagacatgaaattcacatccatgcatgtttgaaaactacacatggtgccgggcgcagtggctcacacctgtaatcccagcactttgggaagccgaggcgggcggatcacaaggtcaggagatcgagaccatcctggctaacacagtgaaaccccgtctctactaaaaaaacatacaaaaaattagccaggcgtggtggtgggcgcctgtggtcccagctacttgggaggctgaggcaggagaatggcatgaacccgggaggtggaacttgcagtgagccgagatcgcaccactgccctccagcctgggagacagagcgagactcagtttcaaaataaataaataaataaataaaatgaaaaataaaaataaataaaaaaataaaagcaatgcggtccctccaccatccacacacaggaacatgacccagctgtgtaacggagcaaggttctgacaccacagtgtggatgccccttgaggatgtcacactcatgagacgccagacacaaaacgccacacagtgtgtaatcccatttccatgaaatgtccaggtcaggccagtgcacagacacaggcagcgggtgtgtgggcagcggggctggagaaggggacggggagtgaccgctgagggggacaggcttcttttagtggggatgaacgttctaaaattggacacattggtggtggcacagctgtggagatatgaaaacgcgaaacctacgggtgagctgggtgaaccttatgaggcgggaattaactgctccggctctggcgctgaggaaaaggaggaccggaggatggtaggcggaaccaggcccagcaccacccgctagaacgccgtgatgttcccacagccctacagggccaagggtgtctatgcaaggtgggtacagggtcggcctgcatctggagggccacacccccatgttacaggcgaggctcctgtgcagagggctgggggcctgccaggacgcaccccttggcagtgaccgggcctcttctgaggtgggaccctcagcctcaaaccaacgcatgctgggccatctggacaagtcagagtctcaggctgccccagcaccgcagctccaagtcccgtcagcctacagtggggcgggataagggttcccaacctgattttatgtatgggaaaactgaggcacgggtcagtaaaaagccgcctcctgaccaccgctgggtcctagacatatcaggtctgcggggaccaattgtaggacggggacccacagaggcagcagtgcaaagcgagctcctcccgcggcaccccggccacccccaagccctccctcccatgcaggcgatcatctgggccgtgccctccacatctgtgtcctgggaacagacttctagaaaaacccaaatcaggaaaaagcggccagctccacgctgcaaacagctgggcaccaggtgcaggcatggtggtgtctgcctctccctcaaagctcccaaatacccctaacctcaagggaggggctgacgggacaccctcaggatgggggtcacacacgagctctcctgtccccacagagagagagctgactgcggctcacgaggcagaggggccaggatgaacaaaacagcagagtttccaacaaagacaagatcagcgccgggacacacaggagcccgttcaaggtgagaaaaaacagcaactctgcaatggcagccacacgcacagaggcatgctgagcacccccagaccatgtgcacggcggtcctgtaagactctaatgcaaacctggcatgggggctcacccctgtcatcccagcactttgggaggctgaggtgggcggattacgaggttaggagatcaagaccatccttgttaacacggtgaaaccctgtctctactaaaaatacaaaaaaattagccgggcatggtggcgtgcacctgtaataccagctactcaggaggctgaggcaggaaaattgcttgaacccaggaggcaggggttgctgtgagccaagattgggccattgcactccagcctggcgacagccagactccacttcaaaaaataaaaagaaaaagaatctaataccatattcttactgcacctttcttgtgtttatttacttattttgagacagagccacacccagcctggagagcaatgccgcaatcacagctcactgcagcctcaaactctgggctcaagcaatcctcctgtctcagctgccccaatagctgggactataggcacacatactactatgcctgcctaattagtttctaactttttttttaagagatggggtcttgctatgttgcccaggctggtctcaaactcctggactcaagcaatctgcctgccccagcctcccaaagtactgggattataggcgggagccaccgcacccagccctttctcgtgtttaaatgctcacatacttaccattgtgtaaccggtgcccacagcattccacagaggagcgggcggtgtgggtctgtggcctaggaggccacgcccaagcctgggtgtgtggtggcttccaccatccgggagtgtgggagtgcactctaccatgcccacacaaggggcacgtctcctaacgacacgctttccacaaggtatccctgtcactaaacgacacctgacttgaattaatagtttgttcattgtagattttttgaattaattgatttttaaaagataatccattagggcccggtgcgctggtgcatgcctgaaatcccagcactttgggaggctgaggcgggcgaattacttgaggtcagcagttcgagaccagcctggccaacatggtgaaaccctgtctctattaaaacacaaattagctgggtgtggtggtaggcgcctgtaatcccagctactcgggaggctgagacaggagaatcacttgaacccgggaggcagaggttgcagtgagctgagatcacgccactacgctgcagcctgggtggtacagagagaccctgtctcaaaaaaaatatacatatgtctgggcgccgtggctcacgcctgtcatcccagcacttcgggaggccaaggcagttggatcacctgaggtcaggagttcgagaccagcctgaccaacatggagaaaccctgtctctactaaaaatacagaattagccgggcatggtggtgtatgcctgtaatcccagctacccaggaggctgaggcaggagaatcgcttgaaccagggaggcggaggttgtggtgagccaagatcacgccactgcactccagcctgggcaacagagtgaaactccgtctcaaaaaaaagaaaataaaatacatatacatatacatatatatatacacatatatatatatattccattaaaacattactcatcccatcgccccagcgtgacgatgagcaaaacaacacacaaacccccattgaggaacatcctactgcacacctgcccagcccgctcaggaccaaccagaacctctaaccaggaacgtgggggaaactatcagcctggaggagcctgggagacagtgacgtagtcactaaatgtcacgtgagatagtggatggggtcttggggcaggaaaggacatcggggaaactgaggaagtctgaatacatgatggatgttgctgggagcagtggctcacagctgcagtcctacaactttgggaggctgaggcaggaggatcagcctgcctcagccttccaaagtgctgggattacaggcatgagccaccgcacctggcataagatgatgggaggctgaggcgggcagatcacctgaggtcaggaatttaagaccagtctggtcaacatggtgaaaccccatctctactaaaaacacaaaaattgcaccattgcattccagcctgggcgagcacagggcaagactctgttgcccaggctggagtgcagtggcatgatctgagctcacagcaacctctgcttcccgggttcaagcgattctcctgcctcccaagtaactgggactatagccgtgcaccaccacgcccagctaatttttgtatttttagtagagacggggcttcaccatgttggccaggctggtttcaatctcctgacctcgtgatccgcccacctcggcctcccaaagtgctgggattataggtgtgagccactgcgcccagacggtttttacatttttaaatggctaggggtagccaggagaggtggctcatgcctataatcccagcactttgggaggcagaggctggcagatcccctgaggtcaggagttcgagaccagcctgaccagcatggtgaaaccccatctctgctaaaaatacaaaaattagctgggcgtggcagtgcaaacctgtgatcccagctactggggaggctgaggcacaagaatcgcttcatcgcctgaatccgggaggcagaggttgaagtgagcggagattgtgccactgcattccagcctggaaaacgagactgtctcaaaaacaaaaacgataaaggccaggggggaagatgaagagactttgtgacacaggcagattctatgcacttcacagttccatgtgtataaataaagttttattgacacatagcagcacccacttattcacctatgggctaaggcagctttcatcctatggcagagctgagtggttcagatgcagacagtctggccttttttagaaaaagtctgctgaccatgcctggtctgccgtgctgtgatgatgaggaaagttctagaggctggggcacctcacaaagaccctttgagcctgcggaacgggtgtgccggggcaggacggcctccttgtgcttgtgaggcgctgcaaagggctggggacaggctgggccttttctttcatctttcacggcatctagcaagtgctaggcttgagggaagtcaacaagtgtgtccacacatgtgggcctggcagggctcagatagcctgagatggcctttgcctgggacccctcggacacacagagcagcataactcggctggaggaggccacggtgggacaaaatggcccggctaagaactacagccctgtgcagaaaatgcaaacaccggcttggggtcacttccaaagtggactccatcctccacgctcgcctgggccgcctccgagaccccctccagcagccctgagcagccaggggacaccggggcaggggaagacagaagatgccgaagccaggtctcctccctcgggaacgtaaggcctggcagggaagtacctggagtacctgcctctcccgcgcctggacacgggccacagcgcggcctccctgcacctgcccccgcccccagcactcagtgatcctccttcaacaaatacccatctggccagcccccaccccaccctttcccaagccctccaacgatgcttgtatatggcgattcatccacaccgccaaaagacaccccctagtgtcacatgggaatgtggaacccatgcttggcctggttttgtacgagtgtgcaagggtgaactcctgcgggcaggaaagaagtgagcaagttagccgggcatggtggtgggcgcctgtaatcccagctactcagaaggctgaggcacgagaagcccttgaacccaggaggtagaggttgcagtgagccaagatcacgccactgcacaccagcctgggcgacagagagagactctgtctagaaaaaaaaaaaggccaggcatactggctcacacctgcaatcccagcattttggaaagctgaggcgggcagatcacaaggtcaagagatagagaccatcctggccaacatggtgaaatcccatctctactaaaaatacaaaaattagccgggtgtggtggtacacgcctgtaatcccagctacttaggagggtgaggcaggagaattgcttgaacctgggaggcagaggttgcagtcagccgagatcacaccactgcactccagcctgggcgacagagtgagactctatctcaaaaaagaagtgagaaaggcgtgtgtgaggacctcgggggccgccacacaccaggatgctgtgagtcgtgttatgagcctgaaaaaatctgaactgagtccctcacgcctcccagcaggctcctcggcctggccattctcatgggggccgtgttaccctcatggaggctgcgtcatcctcgtgggggatgggtcatcctcatgggggctgcgtcatcctcatgggggctgggtcatcctaatgggggatgggtcatcctaatgggggctgggtcatcctaatgggggctgggtcatcctcgtgggggctgggtcatcctcgtgggggctgggtcatcctcatggggctgggtcatcctcgtgagggctgcgtcatcctcgtgggggccaggtgattctcttctcggggcgctgagcagtacccagcctccacccacgctgtgccgatgccgtctccctcccaatgtgacaaccaagggcatgcccagccttggccaagagtcccctgggggcagaagctggccaggtgagagaggccctgctgtccaggtgacctgcatgctcttaggcctgacaccccaggtccctcctcgttcagagctccctcccctgcccccatcctgccagcctgagcctgaggctgctctctgaaccccacgtggcccacctgtgtctagaaggcccccagctattccaggtcactccctccatgtgggcccacatgacgtccccccaccagcggcccccaccccagcaggcttccaactctgctccccactagccgggttcctggcccactagtcgcaggcggaactcccagctgtcccctgccacatgccctgcagacacggctgggtgacagggctcacggaggggccagtgtgtcacctgctaaatggctgccttcactggagtcagacccgcatttcacccagcctgagtgaactgagttgtaaaggatgctgctgcggccccgagaggtggctgggccaggctccctctagggcacagggccggtccaatggggcgtccagtggggctggggctggtacctccccagcactcaccaggccctgcaccctcaaagctccctgcagctgttcgtcccattggcaggtgggataacagaggcccaaagacaagaaaccagctctaaccctgcacgccacgggtccagcaggcggcctctaagttgggacaactccgcactggacagatggcaagatggaggctccaagagacacaggggcctgcccaaagccacactaattgaaaagcaggggactggccaggcacggcggctcacacctgtaatcccagtactttgggaggccgaggcaggcagatcacctgaggccaggagtttgagaccagcctgaccaacaaggccaaactctgtctctactaaaaatacaaaaatgagccgggcatggtggtgaacacctgtaatcccagctactcgggagacgggggcaggagaatcacttgaacccgggaggcagagggtgcggggagctaagatcgcgccactgcactccagcctggacgacggagcgagactctatctcaaaaaaaaaaaaaaaaaaaaagaaagaaaagcaggggatcccaccaagcactgatcttccttctacctccctgaaggcaccagctacattctttcaggttccctgtccccagggcactgtgaaaacaacccacagggagctactgaacaaaagttaacctgctgtggccccacacacaagtaagaggtgggtattataattacacccattccaaaggcgagggcactgagacccagagagggtaagcgactagcccaaggtcacacagagggtaagtggctcccagaaatgacccgaccccctcaacaagcagctcttctcccagaagcccaccacgtcctctgatctccagatgggcgagtggggactgggcgctgcaaatcccgacttcggcacccagctctcccaacaggacactggggcctagggaccccaggaccccaacccatggcaggaatcaagtgggtgctcctgcctgccccccgttctggagtcctgtccttggattgggcatggccagtgggagggacaaagagcctccccagggttaggttggggggcaggacagattgcacccagaccccaagacaccccgacctcatgtccccttggtgggcagactttcccgcctcttctccttcagtctgcactgaagcctcggggcccattcagaacctcaacactttccaccggacccaagatcccaactctcacccttccttcatattctcttgggggcagaacctgccagaccaccgctgacaccagggcacaaataagggactcccaaatttcccgtgggaccccaaggtatcagaacctctccctcggccccctacccaccctgggcctggtgagagatgaggggcctaattcccaccccagtcaccaatctcttctggattcatcagggaactcgctaaagctccagggagaactgagaccacgtgactcaccccagagactccagggagaccccccacacaccccatcttgggcctcctcagagggcctgggccccccagtctccttggagcccagagaccacccccattccaccccagataccccaatacccagcttcatccccagagactcccactcacaccccctcagttggggggggtccgccaagtctccttggaatcctctgagggacgaggcatatggggggctgcagcccaatactcagggagcccccaaatccccaggacctctctttggtggggagccctagtctgtaacccccatggccccaaaatgcacctctcacggaagggtccccagagctagctggaggcccctctgcagccctcactcaggacacggaagatctcctgggaccccctccataggtggggcattcctggtctgcacttttcactcagtgccctagaaaccccctggaggtccccaagagaatgggccactccggtctgcacccctcccaaggggtcccccaagatctcggaaactgcggtgggcagggcctgcccaggtggcacccctcactcagggtctccccctggagatccccgaggccaggctgaccccacccctgctcagggtcccccgtgatcgcgtactccgcggtgggctgggcctggccgagctgcacccctcactcagggaccccttgaaaccccctggagacccccaagccgggacccttcccggtctgcacccctgcccagggtccccgcgatcgcgcaccccgcggtggccaggacctgcacccttcatccaggagccccccgcaaaccccctggagaccccaagccgggagtcgttcagagtcccccgcgatcgcgcgccccgtggtgggcggggcctggccgagtagcacctttcactcagggactctccgaaacgcggcggagatccccgaggccggactgtccccgtctgcatcccagctcagggttccccgcgactgggagccccgcagtgggctgggcctagccgagcagcacccctcactcagaagcccccaaacctcctggagacccccgagccggagcctgtccccgtctgcacccccgcccagggtccccgcgatcacgcaccccgcggtgggcggggcctggccgaactgcaccgctcactcaggggcccctcgaaaccccctggagaccctcgagacccgggcccgtccctgtctgcacccagggtcccagcgattgcccaccccgcggtgggagggacctggccgagctgcacccctcactcaggggccccccgaaaccccgcggaaacccccgaagccggggcccgtccccgtctgcacccccgcccagggtccccgcgatcgcgcgccccgcggtgggcggggcctgccggctgcacccccgcccggcccctaagccccggcgcccacctcgcgcgtggtcacctcctccttctctgagatcttgagcaggagccggtcgttctccagctccagcgcgcggacgcggtcgatgtagtgcgccaggcggtcgttgagctcgcgcagctcctccttctcctgcagccgcgacaggcgcgtgggcgacagcggcgtggcgggcccgcccgcgcggccgggcagcggcgtggccatggtggcggcggctcgcggcctgcgctgctcccgacggcggcccgggctcggcgggctcattcaatccgcgccgccggctgcaagatggcgccgcgccgcgccgcgcccgccgcccgccgcggcggggcagcctgggactggtagtccgaccgccgggcgcgcgcggggcacgccggaagttgaagtctccgtccagctctcgcttcgcagaggcgctgactccagagacagacttcctggctgcaaactcccagctccgccacgaggaaacagcgttgggttgctttctagtacctgtttccccacttagagaacctcaaaacgtgttcaaagaaccagacacaaaaggccatatagggccgggcgtggtggctcacgcctgtaatcccagcactttgggaggccaaggccggtggatcacttgagaaaagaatttcgagatcagcctggaccacatagggagacccccccacaccatctctactacggaggcgcgcgccggtaatcccagctacttgggaggctgaggcaggagaatctcttgaacttgggacgtggaggttgcagtaagccaagatcgcggcactgcactccagcctgggcaacaatgagaaactttgtctcaaaaaaaaaaaaaaaaaaaaaaaaaagccatatagtgtacaatgccactgatataaaatgtccagaagaggctgtcaaggagtatgaatttcaacaaattgagtttaatgatctcattggctcttattagcaattcatgaattggatagcattcaatctattaaataggcactccaatgagctgagcagagaggatgggcattctgcattacaggcagaaaaggctgaagaaaggagaaataagaattaaaataaaagccaggccaggtacagtggtttgctcacgcctgtaatgccagcactttgggaggcggaggtgggaggatagcctgagcccaggagtttgagactggcctgggcaacatagcaagaccccatttctaaaaataaaaataaaaaaattagccaggtgcagtggctcacacctgtattcccagcactttaggaggccaagccgggcagatcatgaggtcaggagttcgagaccagcctgaccaatatggtgaaatcccgtctctactaaaaatacaaaaattagccaggcatggtggcacatgcctgtagtctcagctactcgggaagctgaggcaggagaattgctttaacccgggaggcggaggttgcagggagccaagattgaaccactgcactccagcctaggcaacagagtaagactccacctcaaaaaaaaaaaaaaaaaaaaattagctgggcgcctatagtcctaggtatttgggaggctaaggtggcaggattgtttgagcaagagaggtcaaggttgcagtgagccctgatcacatcactgcattccagcctgggtgacagagtgagagtttgtctcaaaaaaagtaaaaataaaaatacgaaataaaaaccaattggttgtttcaaagttacttttttcatagggtctgttttaaccccctctattttgagggtacttccctatcaggttaaccggtcccctttggcttggtggctgtgaatgtttttttttgaaaacctgcaccctttaaagttcagtttgaggccaggtacgggtggctctcacctgtaatctcagcactttgggaggctgagatggggagatcgcttaagcctaggagtttgagaacatcctgggcaacatagtgagactctgtctccaaaaaaaaaaattttttttttttggagacagagtcttgctcttgtcacccaggctggagtgcaatggcatgatctcggctcactgcaacctccacctcctgggttcaagcaattctctgcctcccgagtagctgggattacaggcacccgccaccatgcccagctaatgtttgtatttttagtagagacctggtttcaccatcttggccaggctggtcctgaactcctgacctcgtgatccacccacctcgacctcccaaagtgctgcagttacaggcgtgagccacggcacccagccaaaaaaatttttaataattagccacatgtgctggcacacacctgtagtcccagctcctcgggaggctgaggcaggagaatggcttgcatccaggagttcaagtctgcagtcagccatgattgcgccactgcactccagtgtgggcaacggagcgagaccctatttcaaaaaataaaaaaaataaaagatcagtttgactacgtggtacctggcactagtgactccattccaattttatctggtctgctggggactagagaccccattgtctaaaacaatggcctgccatacattttatttaacaaggccaggcgcggtggctcatgcctgtaatctcagcactttgggaggccgaggcgggcagaccacctgaggccaggagttcgagaccagcctggccaaaatggcaaaaacctgtctctccaaaaagtacaaaaattagccaggcgtggtggtgtacgcctgtaatcccagctacttgggaggctgaggcacgagaatcgcttgaacccaggaggcaaaggttgcagtgagctgagatcacaccactgcactccagcctgggcgacagagcaagactccgtctccaaaaaaaaccccccaaaattgtaatttaacaagacaacctatacagcagtgtttctccaactctgcactagatatttggggccagatcactctctgttgcagggggttggagtcaggaggtgctgtccattacagggtattgagcagcatcctcggtctccacccactccatgccacgagcatcccagcctcatacttattttttattttatttttatttttagttgaggcgggtctcgctctgtggcccaggctgcagtgcagtggcgtgatctcggctcattgcaacctccgcctcccgggttccagcgattctcctgcctcactctcccgagtagctgggattacaggcacttgccaccatgcccggctaagtttctgtatttttagtagagacagggttttgccatgttggccaggctggtcttgaactcctgacctcaaatgatctgcccgccttggcctcccacgttgctgggattacaggcgtcagccaccgcgtccgaccccggccccctagttatgaaaaccaagtatgtctccagagattgccacatgtcaccagaggggcaaaattgccccaattggagaataacttcctcctgacctagaactggcccggtcttccttctgcctggggaactcctcctttttacacatctcaccttgggggtttggctcagcctctgccagagaccccagtaaatcacacactgagaatctaatgccctttccagcctactgaggacaccaggggaaagagcccacctgcctccaacagccaacattcactcgctattattcccctcttaccagatagacccccagccttagaacccaggcaggaagcctggcatggtggctcacacctgcaatcccagccactctgggaggctgagacaagaaaatggcttgagcccaggagtttgagaccagcctgggcaacatagcaagacccaactctacaatactctacagttttttttttttttttttttttggagacagagtctttctgtcccccaggctggagtgcagtggcccaatcttggctcactgcaacctcctcctcctgggttcaagagattctcctgcctcagcctcctgagtagctgggatgacaggcatgcgccaccatgcctggctaatttttgtatttttgtagagtttcctcatgttggccaggctggtcttgaactctggacctcaagtgatctgctcacctcggtttcgcaaagtgctgggattacaggtgtgagccactgcacccggcccctacaaaaaaatttttttaattagttggtcgtggtggcgtgcatctgtatccccagctacttgggaggccgagtcaaggagatggcttaagcccaggaggtggaggctgcagtgagctatgattgcaccatttcactccagcctggatgacagcgcaagactctctctctctttttttttttttttggcaggggggacagggtctcaccctgtcacccagattgcagtgcagtggcttgatctcggcttactacaacctccacctcccagggtcaagtgattctcctgcctcagcctcccgagtagctgggattacaggcgtgcgccactacggcccagctaatttttgctagagacggggtttcaccatgttggccaggctggtcttgaactcctgacctcaaatgatccgcccacctcggccctgcaaagtgctgggattacaggcgtgagacaccgtgcccagctgcaagactctttctcaaaacaaacaacaaataaaccagccaggcaagagggagctaagcagtgactgcgtatttagaggactgatactgttttccttcctcataaagggaggaatataaaatataaagacagatggtaaagcacaatgggaaataaataatactacaggaggcggggccagaggggagaaggatgattgaggtttgggtgggaaatggggtcacttttttttttttttgagacagagtcttgctctgtagcccaggctgaagtgcacgatctcagctctctgcaacctccgcctcctgggttcttgtgattctcctgcctgagcctcctgagtagctgggactacaggcatgtgccacaacgcccggctaatttttgtgtttttagtagagacggggtttcaccatgttggaccaggctggtctcgaactcctgatctcaggtgatctgccagcctcggcctcccaaagtgctgggattactggtatgagccaccacgcccggccgggtcacttttcctattctccaccctcagactgatctgaaaccgcccccccgctccgcatcaacttctcactgaccaccggccttggccactggctgaccagatcccccaactagccccttactggaggccctgcggggtcccgcccccaaccccatcgcgctgcccctctgggcacttccatccccacatacccccatacccagcctttgcccgtgctgttccatccgccaggagcgccgtttcctgcctgactgcgcggccctgggcctcagtcttgcgctctgcaaaccggggtctcgaatctaccccagccctcctgtctcggcgctggggaggggcttcgggtgcccagagccatccccgcgggacccccagggactggactccaagtcccagaaagccccgcgcttcccgtgggtggggcccggggctttccccctcccagcgcgcagtttgggaggcgctgggcaattttcaaattttggcgccgaacgggaggggcggtgacagctgagaccgtggtccccccgggggcacccacgcccaggctgctgctggcagctgcgcccagagcccgaggtctggggcatcccgcaaagctgccccgtccattccgaggggcctcccaaggcaccacacgcgccagggggctccgggcccatttccattatggaaaactgaggcacaggaaggttagggaccggtcggggaatccgcaccaggggcgtagcggaggcgggattcgaacgcgggaccctctttcccccgggagctagaaattagtgaccaattggctgggcgcggtggctcacgcctgtaatcccaactttgggagtccgaggcgggcggatcacctgaggtcaggagtgcgagaccagaatgaccaccatggcgaaaccccgtctccacttaaaaaaaaaaaaaaaaaaattagccgggcgtggtggcaggcgcctgtgaccccagctactcggaaggctgaggcaggagaatcgcttgaacccaggaggcggaggttgcagtgagccaagatcgcgccattgcactccagcccgggctacaaaagcgaaccttcgtctgaaaaaaaaaaaaagaaaagaaaagaaaagaaagttagtgaccaactgctgtctgcttttggggagagggtacggggccgcgggagagaaatcccggaccctgggactatgcagcccgtgagggccccagtcccgacccgtccattccactgacctccacccggcaccgccactcccacccggggagtggattttggcgccagattttaaaaatctcagcctaacggctgtggctggctcccagcccggaatgcgagcctggagcccggattccggaacctggatctggaggagcccggattccagagcctggttctgagggagctcggattccggagcctggatctcggggagcccggattccggaacctggatctgagggagctcggattccggagcctggatctccaggagcccggattccggaacctggatctcagggagcccggattcggagcttgggtctgagggagctcggattctgaagcctggatctcggggagcctgaattctggagcctggattctgggctgtgggtcttgggaagccgaattctggaacatagattccagaacttgaaggccaaacctggtatctaagatcagaattcaggaccctggagttggaaccttgtgaccccaacagaaatccgggaggcaagcagagctctggggccgtggctggcagctgcctgttaaatgagtgaatggaacagtgaaatcaacacatatttgcgtggcttctactttgtggcaggcactggggggacagaggggaagcgagtacacattataaataagtgaattaggtagggcgcagtggttcacacctgctatcccagcatttagagaggccgaggcagaaggattgcttgaggccaggagttcgagaccagcctggacaacatagtgaaagcccatctctacaaaatatacaaaaattagctaggcgtggtgactcatgcctgcagtcccagctacttgggaggctcaggtgggaggatcacttgagcccagaaggtagaggctgcagtgagcagagattgagtcactgccctccagcctgggtgacaagagtaagaccctgtctcaaaaataaataaatagggctgggcttggtggctcacacctgtaatcccaacactttgggaggccgaggcgggcagatcacctgaagccaagagtttgagaccagcccagccaacacagtgaaaccctatctctattaaaaatacaaaaattagccgggcatgagggagcacgcttgtaatttcagctacttaggaggctgaggcacgagaattgcttgaactcgggaggcggaggttgcagtgagccgagattatgccactgcactccagcctgggtgatggagtgagactctgtctcaaaaataaataaataaataaataaataagtgaattgtatggcatgctagaggatggtgagcatgaggaagaaagaaagtggggtaaatgctggggcatgtgtggagtaggggtagaggtgggcctcttagaaaagggcaagacagggtctcgctatgttgcccaggctggtctcaaactccttggctcaagtcatctgcctgccttggcctcccagagtgctggaattaccggcatgagccaccgtgcccagcttatattcacttttcttatctcacagtttctgtgggtcaggaatccagatgtggcttaactttggcatcctctgtctcagggctctgaaaggtggcaaccaaggtgtctctggggcagagtccacttctagactcactcacacgtggtcagaaggattctgttccttgcagactgttagaccaagagcctcaaatcctggcccactgctgtccagggcctgcctccgttcatcaggaggagctgggggtgaattagtcagggttctccagagaaacagaaccagcaggaggggagagagaataagagattttttttttttttttgagacagagttttgctcttgttgcccaggctggagtgcaatgatgcaatctcggctcaccacaatctctgcttcccgggttcaagcgattctcctgcctcagcctccccagtagctgggattacaggcatgcgccaccacacctggctaattttgtatttctagtagagatggggtttctccatgttgattaggctggtcttgaacttccgacttcaggtgatccgcctgccttggcctcccaaagtgctgggattacaggcgtgagccaccacactcggccaagagatttattataaggtattgatgcacgggggctgacaagtcacaacatctgaagtctgcaagctggagacccaagagagccgatgttcctttttatttttattttttttgagatggagcttcgctctgttgccccagctggagagcagtggcatgatctcggctcactgcaacctctgcctcctgggctcaaatgatcctccccccttagcctcccgagtagctgggattacaggcatgcgccatcacgcccggctaatttttgtatttttagtagagacagggtttcaccatgttggaaaggctggtctcaaactcctgacctcaagtctcctgcctcccaaaatgctgggattacaggcgtgagccaccatgcccggctgagagctgatctttctgtttgagtctgaagacaggaaaaagctgatgttccagtctgaaggccttcaggtgggaggaattctctgctccccaggggagtggcagcctctgtattccatccgggccttcagtgaattccgcaaggcccacccgtgctagggagggtagtgggtttgagtgactcagtgagtctactgatgcaaagggtcaaaggctcatctcatctaataaccccctcaccggcatgcacagagtaatgtttgaccaaatatgcaggcacccacagcccagccatgatggcatataaaattaaccaccgggcggggcgcggtggctcacgcctgtaatcccagcactttgggaggctgaggctggtggatcacttgaggtcaggagttcaagaccagcctggccaacatggcaaaaccccgtctctactaaaaaatacataaattagccaggcgtggtggtaggtgcctgtagtcccagctactggggaggttgaggcataagaatcacttgaacccatgaggtggaggttgcagtgagccaagattgcaccactgcactccatcccgggtgacagactgagactgagattctgtcaccaaaaaaaaaaaaaaaaaaaaaaaaattaagcatcatacagccgggtgcagtagctgctcatcctgtgatcccagccctttgggaggccaaggaggaaggatcgcttgaggccaggagttcaagaccagcctgggtaacagagcagggccccatatctacaaaaaataaaattagctgaaagcgcctttgcaaaagttctatcagtgagaaaaaaaaattttttttttttgagacggagtctcgctctgtcgcccaggctggagtgcagtggcacaatctcggctcactgcaacctccgcctcccgggttcaagcgattctgctgcctcagcctcccaaatagctgggactacaggcacgcgccaccatgcccagctaagttttgtatttttagtagagatggggtttcaccatgttggccaggatggtctcgatctcatgacctcgtgatccgcccgccttggcctcccaaagtgctggaattacaggcgtgagccaccacgtccagccgagaaaattataacagtaggctaaactaactaacccccatcttgccttaattattcctgggctattgggcccagctaacttgggaagacatttaggctacagtttaagtgatagtagaccttgcacaaaacccaacagcttttgtcaagctaacctgaggccttcaggttgagggaggaggggagcctgacatctgttaaggtgcaaacgttattctggaggttataagatatgcagcttccaggccaggtgcggcggctcacgcctgtaatcccagcactttgggaggccaaggcgggtggatcacttgaggccaggagttcaagaccagcctggccaacatggtgcaaccccatctgtactaaaaatacaaaaattaaccaggcttggtagcccatgcctgtagtcccaaatacttgggaggctgaggcaggagaatcgcttgaacctgggaggcagaggttgcagtgagccgagatctcaccactgcactccagcctgggcgacaaagcgaaactcagcatgcaaaaaaacaaaaaaaaaacaaaaaaaaaacaaaaaaaaagagatgtggttcccccaattactcctgcaaataacaccattattgtagtttggccttttgagatgtctttccacgtgttttgcatgtctgacacccgtggctccacctggactgacaaccctgctcctgaggttccacacagaagcgatctggccggcaggaggacccctgcaacctgctgtgagtccatctctgcccccaaccaaccagcagcaagcacctgtttacctggcccactcccactccttcccacaaaactgcccttgaaaaacccctaacctaggctgggcgtggaggctcacgcctggaatctcagcactttgggaggctgaggtgaacggatcacctgaggttaggagttcgagaccagcttggccaacatggtgaaactccatctccaccaaaaaaaaaaaaaaaaaaattagctggatgtggtggcgtgcacctgtaatcccagctattcagaaggctgaggcgggagaacctcctgaacccaggaggcagaggttgcgaattgcttgaacccaggaggcagaggttgcagtgagctgaggtggcgccactgcaccccagccttggtgacagagcgagactcgtcgcaataaagaaaaacctctaacctatgaggtttgaacaagttgatttatgaattccatctcccacgtggcgtggccagcctcatgtctattaaactctttctctactacaatgctgtggtctctttctctttcgttgtttcctttcttttcttttttttttttttgagacagtctcaccctgttgcccaggctggagtgcagtggctcaatctcagctcactgcaatctccgcctcccgggttcaagcgattctcctgcctcagcctcccgaatagctgggattacaggcgcccgccaccactatgctcggctaattttgtatttttagtagagacggggtttctccatgttggccaggctggtctcgaactcccgacctcaggtgatctgcccacctcggcctcccaaagtgctgggattacaggtgtgaaccaccgcgcccagcctctattttttttttttttttaagtaaaatactttgttagactgggggtctccctatgttgcccaggctggtctcaaactcctggactcaaggaatcctcccactttggcctcccaaagtgctgggattacaggcgtgagcccctgcacccagtcacgtggtctttctttatgcagtgggcaggaagaacccctgcatagcggggtgtggtggcccatgcctgcaatcccagctatttgggaggctgagatgggaagattccttaagtcaggagttcaaggctgcagtgagctgcgatgtcactgcattcaagcctgggcaatagagcgaagcccatctctaagaaaaaaaaaaaaaaaaaaattaaccaccctgggggatcactggagccaggcccgaagctgcccaccatgctagcattgtctgcaatgcctgctgccgggggttccagctgttccgatgtctgtgagcaagtgtgtaagttgtaaaatactcagtgcaaggcgaatgattcctgtccattgtgtagcaagaaattttgcctcgaccagagagagatctggcttttgtttcagccactgggaggtgactcttaggccccaggaatgtcctgcctgatggatataccgttctgttttttttttttttttgagacagagtcagagtctcactctgtctcccaggctggagtgcagtggtgcgatctcagctcactgcaagctccgtctcccgggttcaagcgattctcgtgcctcagcctctcggagtagctgggattacaggcgccttccgccacacccagctaatttttgcatttttaggagagagggggtttcaccatgtgggccaggctggtctcgaactcctgacctcaagtgatccattcgccttggcctcccaaagtgttgggattacaggtgtgagtcaccgcgtccggcattcgagtggctttcgaggtcactacagtaggggaggtgtacggagcactttctatgccaagcccattctaggtccttgttttgggtaaacatttccacaacctgacttttcccatgaaaagagggagtttcagggaggctaagccaccaacccaaggacacacagctgatgacggctgcaggtgggatttgaaccaggcaaacgtgacctcagacagagcctctccttctccctctctctgcgaggcatagtcccagacctgccagcctcttgctgtgcacagtttccctgcccctcccctgccactgtcctcagaatttcccaaatgtgcctcagccttcgccgtagcctccgctgccacctggcgtggtgatcccacctcctcccaccccaggcctgtcttacaaatgtctgcaagttcaaatgatgactcagctccatcccgaaacctctccttggggacaggagtcatgtcttgctcgttttgttcatctttgcagaaaaacatgatgtcagagcccagccgctgccaatcacttcctggctacatccggagtgacacgcagacccctccccgcagcccccaaagcccgtctctgtgagctcatcttcccggctctccctcttgcttactctgttccacccccagggcctccttgggattcctcaaatgcaacaggtgaggtcctgcgtcagggccttttcaaacactgtgcctgctgcctgggacctctgcccccagagccccttgaacctgactttttaccgttttttttttttgagacagagtcctgctctgttgtccaggtggggtgcagtggcatgatctcggctcactgcaatgtctacctcccaggctcaagtgagtctcctgactcggcctcctgagtagctgggattacaggcatctgccaccacgcctggccaactttttgtatttttagtagagacggggtttcgccatgttgtccgggctagtctcgaactcctgacctcaagtgatctgccctccttggccttccaaagtgctgggatcacaggcatgagccactgcacccagcccgcccccacttttttttttctttttgaggcagggccttgttttgtcgcccaggctggagtgcagtggtgcgatcatagctcactgcagcctcaaactcctgggctcaagtgatcctcctgctttagcctcccgagtagttgggactacaggtgtgcccatcagacctggctaatttttaaaaaattatttgtggctgcgtgcggtagctcacacctgtaatcccagcactttgggaactcgaggcgggtggatcatgaggtcaggagtacgaaaccaacctggccaagatgtgaaaccccatctctactaaaaattagccgggcgcagtgtaatcccagctacttgggaggctgaggcagaagaatcacttgaactcgggaggcagaggttgcagtgagctgagattgtgccactgcactccagcctgggagacagagagagacttcgtctcaaaaaaaaaaaaaaaaaaaaaggccaggcgtggtgggtaacacctgtaatcccagcattttgggaggccgaggtgggcggatcacgaggtcaggagatcgagaccatcctggctaacacggtgaaaccccatctctactaaaaatacaaacaattagccgggcgaggtggcgggcgcctgtagtcccagctactctggaggctgaggcaggagaatggcgtgaacctgggaggcggagcttgcagtagccgagatcacaccactgcactcctgggtgacagagcctgggtgacagagcgagactccgtctcaaaaaaaaaattatttgtagagatgggagtcttgccaggttgcccaggctggtctcgaactcctgagctcaagcgatcctccccacttggcccccaaggggctgagattacaggcatgagtctacccttagagacagaggctgcacgaagtcatgatcacaccactgcactccagcctgggcaatacagggagaccttgtctcaaaaaagaaaaagagaaaggaactaatctcattagaagactccactctcatgagctcatctgaccctaatcacttcaaagcccccccgcaacaccgtgcccagcctgcagtacgtttttttattttttatttttatttacttatttttttgagatggagtcttgctctgtcacccaggctggagtgcagtagcgcgatctcggttcactgcaagctccacctcctgggttcacaccattctcctgcctcagcctcctgagtagctggcactacaggcgcccgccaccacgcccggctaattttttgtatttttagtagagacagggtttcactgtgttagctgggatggtctcgatctcctgacctcgtgatctgcccacctcagcctcccaaagtgctgggattacaggcgtgagccaccacacccggccacattttttttttaactctgaatgaatgcaaaaacctctatgctggataaaattttaaaaatttattttgtttaaagccaaatacggtgactcacgcctgtaattccaacactttgggaggccgaggcaggcagatcatttgaggtcaggagttcgagatcagcctggccaacatggcaaaaccctgtctctactaaaaatacaaaaaattagctaggtgtggtggagggcgcctgtagtcctagctacttgagaagctgaggcaggagagtcacttgaacccaggaggtggaggttgcagtgagctgagattgcgccactgcactccagtctgggtgacagagcgagattctgtctaaaaaaaaaaaaaaaaaaaaagattatgacaggattactcatactgattattcctctcacctcaggctccaagatggcctcggcgacactgttattgatctcattttttattttattttatttttagacacagggtctccctctgttgcccaggctggagtgcagcgacacaatcatagctcactgcagcctcaaactcccaggctcaagtgatcctcccacctcagcctctcacgtagctgggactacaggtgcgcaccaccacggtcggctaatttttaaaatttttgtagagatggggtctccctatgttgcccaggctggtctcaaactcctgggctcaagcaatcctcctgcctcggcctccaaaagtgctgggattacagaggtgagttctggcgcccagcccaaagataatagcacacatttcctgagtgcttacctgattctgggaatttcctccttcaatgcctgtgatgaagcctttgtgtgactgttcccatcttacagagaaagaaactgaggctggagctcattttctttttttttttttttttgagaaagagtctcactcttgttgtccaggctggagtgcagtggcacgatctcggctcattgcaacctccacctcccgagttcaagcgattctcctgcctcagcctcctgagtagctgggactacaggcatgcgccaccatgcctggctaatttttatatttttagtagagatggagtttcaccatgctggccaggctggtcttgaactcctgacctcgggtgatccacccgcctcggcctcccaacatgctgggattacaggcatgagccaccacgcctggcccggctggagctcattttctgagctcaaaggcacagagctcagagtctcttgaagatattccaagatactccagatattctaagatgcctggagccagggctggaaaaaggaggcacaggtgggcttggggtctagaaagagaagcctggagggtggaggaccatgggggtccaggcagtcagtctgggagaaaacaaggccaagtcagtgttgacagaggagtagggttttcctgctgaagaccagaggaagacagcatcccaggcggaggaaacagctgacaaaggctgggcctctcgcagaggaggttgttatggctggcacgggggacacacggaagaaggacttggacacatattctctgaggccctgctttgctcgccttattttatttattttatttgctttatttttgacacagtgtctcgctctgtctcccaggctggaatgcagtggtgcaatctcggctcactgcaacctccacctcccgggttcaagcgattctcctgcctcagcctcccgagtagctgggattataggcatgtgccaccatgcccaggtaatttttgtattttttgtagagacggggtttcaccatgttggccaggttggttttgaactcctgaccccagatgatccacctgcctcagcctcccaaagtgctgggattacaggcatgagccaccgtgcccagcccttattttatttatttatttgagacggggtctcactctgttgcccaggctggaatgcaactgtgcaatcccggctcactgcagccaggaacccctgggctcaagtgatcctcctgtctcagcctccggagtagctgggtgcacacaacacaccccattctttctttcttttttttttttttaaagactgagtctcactctgtcactcaggctggagtgcagtggcacgatctcggctcactgcaatctcggcttactgcaacctctgcctcccaagttcaagcaattctcctgcctcagcccccagagtagctgggattacaggcatgtgccaccacgcccgactgattttgtatttttagtagagatggggtttctccaggttggtcaggctggtcttgaattcccagcctcaggtgatcctcctgcctcagactccccaagtgctgggattacaggagtgagctaccgtgcccggcctttttgtttgtttgtttgtttgtttgtttgttttggggaggatggagtctctctctgtcaccatgccatgtgcagtggcatgatctcggctcactgcaacctccacctcctgggttcaagtgatactcctgcctcagcctcctgagtaagctgggattacaggcgcgtgccaccacgcccagctaatttttgtgtttttagtagagacagggtttcaccatgttggtcaggctggtctcgaactgacctcacgatctgcccgcctcagcctcctaatgtgctgggattacccagcctgcaatactttttaaaaatcaaaatcaatgcccaagtatccatgaggaacaaaatatcaaaattgtaaataaagacagaatctgactttgcacttatcccacccacctccctgatcttccttatcttcagctcatgttggccatgttggtcaggttggtctcgaactcctgacctcagttgatccgcccgcctcggactcccaaagtgctgggattacaggcgtaagccaccgcgcccggccgatttaacttttaaattgaaattataaaatataaatatgtatgttgcatgcgtaaaacattgcataaagttacataaaacgttgcaaccgccacggtccccttatcccccgcctccagcccagtgccccgcccgtccgtccctctcttccggcgctgagggcgcagaaactcggcgcggccaccagatggcgccaccgcgcctcgcagccccgggacatttcgtgccccagcggtgggcggcgcggaggaggtgggatgcgtcagccggacccgcgggccggggagccgggcaactggggaaagtgagccgccgggcggaggccagaccccaggctggcgggggaggggactcagatgtgagtcacccgggagcccccagtcgaccgtgggagacgttgtcatgcggggcctgccagcctcgctcctgaacagccttcccggggcggcggagtcctgcaggcggccgtgcctggcgcacacgcgtggctccaacacgaactagcctatggcctcaccaagcctcagtttccccttttgcataatgcacataagcatcccccctgcttcccaggtcttggattaaatcatccatgaatccggaggggtggggggtaccaggtccgcaccacgcactcaatgcaggtcagcgcccaccccggagtgagaaataaaagtagccgtcatccttgcacgtgggccctgggtggcggcgtgcagccggagcctgcaccattcccctcaacaatggctttctccagggcctggaggcctccgcacgggcaaaggctggaacgccaggcagccggcgggggcggggccgcgccacctgcacctcccacgcgcaccccaccctgatactcgcggggtcggcgaggaggcgcccactttcttctccagagcgccccgggctttgcaacctcccactttcggggccctcgaggaggcctcccgcgaccaccaggtgacagctgatgtgtattgggctcttactgtcagccgtattttatgccatgctctgcaaaccagcgaggccggcgctgcagacccattactcagacgggaacagagaggccgggagaagcgaaatcacccaggggctggggtcgtcgcagccaggagagactccggccctcaccaccacctgggcgagatcacgctgcaaacggggccccttcccggtgcagcccctccacccccagcagaacttgggaaaggcgcggtccgggactctccgcggatcgggaggggattccaggcccccccgaaagtccgggccgcctcgcgcgctggaaatcccgcgcgcgccccgaaccgcggctcggctgccgggaaatcaggagaaaaaaacttctgcttttttttcttttctggcattcgcggtcacctacccggcccccgcgcgccctcctcccggttctcgcccccacgtggggcgcccccgcacgccgctcctccccctcccctccgtcggccaaccgcagagctagctgcactcgcccttgtctttccaccaataggaggggcgaatgactccactgaggccacgcccaatgttcaagtctataaaagtcggtgccggaggctcccagctcagatcgccgaagcgtcggactaccgttggtttccgcaacttcctggattatcctcgccaaggactttgcaatatatttttccgccttttctggaaggatttcgctgcttcccgaaggtcttggacgagcgctctagctctgtgggaaggttttgggctctctggctcggattttgcaatttctccctggggactgccgtggagccgcatccactgtggattataattgcaacatgacgctggaagagctcgtggcgtgcgacaacgcggcgcagaagtaagtagccggggctgccgccgcctgaggtcagccgggacgggatgggtcgggttgggccgggccgggagcggaacgtagcacccggtggtccgcccgtcactgatccctctttcctggtctcaggatgcagacggtgaccgccgcggtggaggagcttttggtggccgctcagcgccaggatcgcctcacagtgggggtgtacgagtcggccaagttgatgaatgtgtgagtcagacccccttcccgggctgggcgcgggtgggacgggacctcccctccgctctggacgctttccgcacgcttgtcttgcatggagctgggacttccccaagtgccccccgctgtggatgcagagcttctctgccgttttgtggatcgggggctgccgtatcctgatgtatcgtctgcaaacacccctcccgccgtgggcctgtctccccctaccccatactttgaaccgtgtgccctcccctccccccaccgtcaccagcttgcagaggcaatcccctgcacccttgcagtttctcttttgctcttgcacgctccttttttgcaaactccccctgcacggtggcccctcccctgtccccggctgacccatccctaccctttggccccctcagggacccagacagcgtggtcctctgcctcttggccattgacgaggaggaggaggatgacatcgccctgcaaatccacttcacgctcatccagtccttctgctgtgacaacgacatcaacatcgtgcgggtgtcgggcatgcagcgcctggcgcagctcctgggagagccggccgagacccagggcaccaccgaggcccgagacctgcattgtctcctggtcacggtgagtcgggcctctgccctgccccgccacgcccgggcacctgggccggtgtttgtcaacaaagtcgggctgactggtcctgcacagctcagcgctcagccacgtttggcatgtcccgtgggcagccgggctggggcctcctcacccaggaagctattttgagcctgactgttttccccacacaggggccccgggagagggaggctccactaaaccccttcttttccctcctacagaaccctcacacggacgcctggaagagccacggcttggtggaggtggccagctactgcgaagaaagccggggcaacaaccagtgggtcccctacatctctcttcaggaacgctgaggcccttcccagcagcagaatctgttgagttgctgccacaaacaaaaaatacaataaatatttgaaccccctcccccccagcacaacccccccaaaacaacccaacccacgaggaccatcgggggcagagtcgttggagactgaagaggaagaggaggaggagaaggggagtgagcggccgcccccagggcggagatccaggagctggcggccgccgatccgatggagaaggggggacccaggccagcaggagacaggacccccgaagctgaggccttgggatggagcagaagccggagtggcggggcacgctgccgccttccccatcacggagggtccagactgtccactcgggggtggagtgagactgactgcaagccccaccctccttgagactggagctggcgtctgcatacgagagacttggttgaacttggttggtccttgtctgcaccctcgacaagaccacactttgggacttgggagctggggctgaagttgctctgtacccatgaactcccagtttgcgaattatagagacaatctattttgttacttgcacttgttattcgaaccactgagagcgagatgggaagcatagatatctatatttttatttctactatgagggccttgtaataaatttctaaagcctctggttgcttgtatgttttcggcttctagaacaactaggacccctgccccctccccggggacacgcttcaccccccacaacccccgccagctcaccaggaagtgttacttaagcccctgttagcagctccaggctcccgtgcagaaacagtaccccttctctccgcagcaggcgccgccaccgactccaacaaatctatgcctctttttttttttccttctcctcctaccctgcagcaattaagagaccggtttattacgaaacctggccgccgtgccaccactgttactggctgtgcaggagccaaccccaagctctgggcacatatggaggcatttcagcgggagggggtgctggctgcagcccctgaccgcctaggcggccaccgcagcccaaggtccggatcggtcaagggggcacctggtaccacacagcgaggtgagctcagggcttgcaaggaagagcgcttttggaggcttccccagggagtgcccccccagcccaccacagccttctccatcccaggataggcctctcttttgcactaaagaaaaaaactttttttatttccgcaaactaaaatcaacaagcagaaaaataccccaggaagtcggcctccgggccagccgggcttggcgcagtgctgcgttttgcctgtaaaccgaaactgcgagccctggccagccacctcctacttctcccaaagttgcaggcgcggtggtgactccccctgccccgggctgggagcgtggcccagcccttccgtgcccggcctcagtcttcccgccccgggtctgcagagtgggcccgccctggccaggcgccgggacgacctcggttcccctctgccctgcagcccccaagcctgggaactaggggggagtggggagggggtggggtggtcctgcccgcaggccgcgacctttccacggagcctcacgtgggcgcatgaggaaaaccccagcggctccctaggagtcacggggatcgggggagccccgacgggggagggagagagagaaggagggggaagtcccagagggagaagcggggaggggagaggatcccgcctggggctaggaggaggggagaactgaagtggggagaggggagcccaagaaggggaaggggaatcccccacagccctgaaccaacagggaaaccccgggaggggggtagacaggtaggagtcccgaaggggttgggggaggggagaatggaggcgaagaggcgggagccccgagggggtagggggtgatggagtggggatccctgagatggagcccaagaggggagggcacctgggaagagtgacagagggcgaggggctcttgagggattggggtgcgggagaacatgtggggccaaaacccaagggggctccaggtggggaaggaccaggtggggcaagggtgcgcctagcggcggcctggaaaagctctggcttttctttttctttcttttgagacagtctcactccatcgcccaggctggagtgcagtggcacgatctcgcctccctgcagcctccacctcctgggttcaagcgattctcctgagtagctgggaccacaaggacccactaccacacccactagtttttgtatttttagtagagatggggtttcaccatgttggccagactggtctcaaactcctgacctcacgcccgacttggcctgcaaaatgctgagattacaggtctgagccaccgctcccagtctctggctcttcgttggtcaacctcgtagggtagggaggcgaggccagctcggagggctatgcccccggggatcggatggtctgtctccatccggattgttccattcttgctcctcggtctctagaactgtgcagcaggatctcaggctcctgagccccaagtggagacagggcatggaggggccccagtggtgggaccctcagccaggaccttcacctgtctgtgcctcagtttctccctctgaaaaatgggggataatgctacctagctcatagattgttgaggaggttaaatgatatatagattcctgggccggccctgtggctcactctctgtaatcccaagactttgggaggcttgggggaggtggggaggaatccctgaacccaggagtttgagaccagcatgggcaaacatagagagatccagatctctacaaaaaaatttaaaaattagctgggcatggtggtgtgggcctgtggtcccagctacttgggagcctgaggcgggaggagcacttgagccctgaagattgaggctgcagtgagctgtgatggcaccaccacactccagcctgggtgacagagtgagaccctgtctcaaaacaaacaaacaaacaaacaacagaccctgaaatatagattccttgaccggcttccttcaatgtacttccagaatcatggttttttttccccaatttttaaaagatcattcatttaaaaattttagatttagctgggcgtggtggcttatgcctgttatggtttgaattgtcttccccacaaaagatgtggaaggctgggcgcagtggctcacgcctgtaatcccaggactgtgggaggccgaggtgggcggatcatgtgaggtcaagagttcgagaccagcctggccaagagggtgaaaccctgtctctactaaaaatacgaaagttagctgggtgtggtggcgtgcacctgtagtcccagctactcgggaggctgaggcaggagaatggcgtgaacccgggaggcggagcttgcagtgagctgagattgcgccactgcactccagcctgggcgacagagagagactccatctcaaaaaaaagaaaaaaaagaaaagaaatagggtctcactatattacccagtctggtctcaaattcctggccttaagtgatcctccagccacggcctcccacagtgttgggattacaggcgggagccaccgcgcccggccctctcctattgttagtactcttgcagttgttattgttgttgtcatttatgaaagtattccacggtctccctgaccgaagccagggaagtacaggaactggctttgaaggatgctgtttcattgaattaataatagcagctaggttgattcagtcttctctgggactcaactgtaaacacctataaacttactgtggccccgtgaggaagatgctgttgtcccatcttcccaaagaagagactgaggctcagaatggaggagccacagcctggctaggagtcttgaattgtcggtgtctggctggtcagtctctggggaaaactctgggttgagaggacccgggggatgcaacacccccagctccccagaccccttcaagttcacgctgggtcaggaaggagtagtcacagggcaccaagcctcagtcagctggcacgggccgttctgggctcccacactcaggactggatgccaggatacatgtgtgtattccttggacgacggtgagtggaagagttggcagtgcccaccgcaggttgcaggcagacacgcttcccaggccggactcgtgaagttgggtgcgtgctcaccccagggtgcccacgatggcctgtgtctgaacctacactcacaggctgaaacgcatacacacgctcacaccccgctatgcagtcatattcacagctggagacatggacatgttcacacgcacgcacacacatactgcatgccacggacacagagtcgcctgcaagaggacacatgagtccatagaaatgcctcccatggccgggtgtggtggctcacacctgtaaccccagtactttgggaggccaaggagggtggatcatctgaggtcaggagtttgagaccagcctggccaacatggtgcaaccctgtctctactaaaaatacaaaaaaattagccaggcgtggtggtggatgtctgtaatcccaactacttgggaggctgagacagaagaatcgcttgaacccaggaggtggaggttgcagtgagctgagattgtgccactgcactccagcctgggtgagagagagagactccatctctcagatgatccacctgcctcagcctcccaaagttctgggattacaggtgtgaaccacttcactcggccttattttttaattttttttcctttgagacagggtctcactcagttgtccaggctggaatgcagtgctgcgatcttggctcactgtaacctctgcctcctcagctcaaacgatcctcccacctcagcctcctgagtagctggggttacagacgtgtgccaccacgcccagccattgttgttttttgagacagtgtctccctctgtcatccaggctgaagtgcagtgatgtggtcatagctcgctgcagcctcaacctgctgggctccagtgatcctcctgccttggcctcccaaaatggtgggagccacacgcccagccactatctgctttttatagaaagagaatgtggagttcagataggtgcagtgacttgtccaaagtcacaaggtacaatggcagagccaggaaccaaaccaaggccagcgtggctcaaagtactgttttttcagacacacgcatgcacacacacacacacacatgcacacacgcatgcacacacacacatgcacacacacgcacacacacgtacacacacatacacagacatgcacacatgtacacacacatacacagtatatatactgtatatatgtacacatatatagtacgtatacacactatatataaatataatgatatatattattgagatatagttcatataccataaattcacccctttaaagtctttaactaagtggtttttagtatattcacaaaattgtgcaaccatcaccactattgaattccagaatattttcatcacccccaaaagaagccctgtcaccattagcagtcactcttcacgccccctcccccaacccctgacaaccgctactccacattttttccatgaattcacctgttctggacatttcatataaatgaaatcataaaatgtgcaaccttttgtgtctggcttcttttgcttgcacactgttttgggggctcatccatgatgttgtatgtatcggtatcaaagtttgaacatactggatgcagtggcggaggcctgtaatcccagtactttggaaaactgaggcaggaggattgcttgagcccaggagttcgagaccagcctgggcaacatggcaagacctcgtttctaaaaaaaaacaaaaacaaaaacaaaaattaagccaggtgtggtggtgcatgcctgtaatcttagctactggggaggctaaggtgggaggattgcttaagcctgggaggctggagctgcagtgagctgtgatcacaccactgcactccagcctgggcaacagagtgagaccctgcctcaaaacacaaaagatttgaacttgtgtggcctgccctgtgcctctgctccccagaacatgtgcctgggaatcccagcagtatactagcaccctcacgtgtggacggccatccctgggaaggcactcagagtcacacacacaattcgtatttagtgaccagccactatgtgtgggccttgcacatgcaaatcctcaacccacatgttgtttatacacctggctctctaacatccaaccagggcctgtgctgatgcctctggccagaacactcttccctacctttctcctagttaacacctactctccttttgctcacatctcagatgccacctcctccaggaagccctccaaacaagacctggaatgacctctgtactatctctgcccacctgcccttcttggtacttgcaccatttatttgtttgtttgttttttgagacagagtcttgctctgcccagcccctgcacccatttgtaatgacatatttataatcctgttatttgcttcttgtctatcttctgcgtgaagctgcagactcccagagggaggggagaaggtctgtttttctcacccccagatccctagtggctagcccagaacctgggacacaggcggcacttcataaatgcttatggcataaagactcagtcaagtctgtatgatgagaggttgaactgctgatgaccttctgtgtccatgctccagcacagacagtttcggccctaagggacacacgttgatctgccaggtgctgggtcctggccaggtagagtgacacctctcagctcaggaaggctggaacctggctctgtggaggaggccagccgcgtggcctcgggcaagttgcttcacctctttgcattcagttttcttgttggtgcaatggggatgccaatggtggtgcccatctctctcggggctgttgtgaacattaaattaattacattatgcaaagcatttagaacggggagaagcttgcagaaaagttagctattattagtgagctagtacaccatacaatgctttctgcctgtacatgaatatctgcatagctgcctgttaatgtgagttggaatttgtctctgaatctctgcacaccgcggtgtgttgggccatgaggacttgtgctgctatgtgggaacacagcaatatacgtacacgtgtggctgttgctacaattcttggcatccttggagtgagccctggacacccagaactcctgaccaactggggactcgtgattgcaccttcctcatcaccccaaataggaggtccatagctgctgatgctgctcacctctcccccagagtggccccagggcacgacctctgtggctggtggtttggaggtctatttattattttttgagacagtctcactgtgttgcccaggctgtagtgcagtggcatgatcatagctcactgcagctcaagcaattctcccacctcaacctcccaagcagctgggattacaggtgcctgccaccacgcctggctaatttttgtatttttagtaaagacagggttgcgccatggtggccaagctggtctcaaactcctgacctcaagtgatccacctgccttggcctcccaaagtgctgggattacagatgtgagtcaccgagccctgccattttttatttttatttttctaagagatggggtcttcctctgtcacccaggctggagtgcagtggtgctgtcacagttcactgcagcctcgacctcccagactcaagcaatcctcccacctcagtctccccagcctcccaagtagcgggaactataggcaagtaccaccatgactggctagggtttcactatgttgcctaggctggtctcgaactcctggcctcaggtgatgtccccatctcagcctcccaaagtgctggggttacaggcctgagccatcacaccctgcctgactcattcaatatttatttagcccctactgtgtgcgagggcctgtgttaggcttagaaaaacaagagagaacgagataaagagaggcatctgtgtgtatgggtgtgtgggtgtctgttgcgtgttgagtatgaattctcattcacgtttccagcatgcgtggccggaaagacttgggtgggtgtttttgtgtgaggatgttatggtttgaattgtgtcctccacaaaagatgtggaaggctgggcatggtaactcacgcttgtaatctcaacactttgggaggccaaggcaggagaatctcttgaggccaggagttcgagaccagtctgggcaacagagagagaccttgattctacaaaaaataaaaaaagatatggccgggcacagtggttcacgcctgtaatcccagcactttgggaggtcgaggtgggcggatcacaaagtcaagagattgagaccatcctggccaacacagtgaaaccctgtctctactaaaaatacaaaatttagctgagtgtggtggagtgcacctgtagtcccagttactcgagaggttgaggcaagagagttgcttgaacccggtaggcagaggctgcagtgagctgagatcgcgccactgcactccagcctgtcgacagagcaagactccatctaaataaaaaaaaaaaagatattagcctggcatggtggcatgtctcaaaaaacactgaaggaatcaaagcacacacccagggccacctggtctcagacacacagatgtgtgcatttgcatatcaaccccctattcatgggtgaacgtgcatctgcaatgacgcagtccagagcacagaaggaaagagacgatggtgcctccctgaagaggtccctgctgtgggcatctggggctgagccccgtagggaactgtgagaggtgtggtcacaatggggcaagacagccagtgggggcatctacttattttattttattttattttattttattttattttattttattttatttttgagacggagtctcactctgtcgcccgggctggagtgcagtggcgcgatctcggctcattgcaagctccgcctcccgggttcacgccattctcctgcctcagcctcccgagtagctgggactacaggcgcccgtcaccacgcccggctaattttttaatattttttagtagagacggggtttcaccatgttagccaggatggtctcgatctcctgaccttgtgatccgcctgtgtcggcctcccaaagtgctgggattacaggcgtgagccaccgcgcccggctattttattttgaggcacagttttgctcttgttgcccaggctggagtgcagtggcacgatctcagctcactcaggttcaaccgattctcctgcctcagcctcccaaatagctgggattacaggtgcgtgccaccttgcccggctaattttttgtatttttagtagagatggggtttcgccatgttggccaggctggtctcgaactcctgaccatgtgatctgcctgcctcggcctcccaaagtgctagattacaagtgtgagccaccgtgcccggctggcatctacttattaaccaactgcatcccccgtttgaggggtgttctggggtgttgactccctggtacttcctgcctacccagagggggttctcggtgagtgtctgtacgcaggtgggtgcctgcacacagtaggtgctgcatgtctctgggtgtctgcacacagtaggcatggcacgcaggtggggctctgcacacagtaggccttgcgtgcaataaagacgctgcacacagcaggtgtttgcatgaaggagaggggctgcacgcagtaggtttgcacactgttagagaaagaccccaggcaaagggacacgggaagccgttggactgtaggaaattgtcggaagccagctcccaggtggccaaggggacatagcagcatctgccatgcccttttgtgcactttaagcactggttctcagacttcagggtgcattggcaaccccctgggtacccccctttttttttttttaaatagagacaggatctccctatgttgcccaggctggtctggaactcctgggctcaaaggatcctcctgcctcccaaaatgcgaggattacaggtgtgagccaccatggccggcccctgggtacactttcaatgtggtgggttggatgttgtggcaggggaccctaaaccgggtctccccttttctaggacacagcagaaggaatgcagaggcttcctgagccgtcactcttccttactttctcccgggacccccttctctctgcagaccaccgccaagagcccagccctcagagccccagaactccctgcagcttcccagctctaggccttggcccctgtgatctccacctcgtggtcggggcagtgcccagccagggctccggggaggcgagggaggaaccagggtgggtctccttggaggaagcagagagtcacggagtcttgcagagagaggctcagagccctgcacgtcactttctccagcccccaccccagagcctggagcatgctccccggacatgtaggtcacgcgacccacagctttacagatccctagggatccaggagggacccccgagacccagaacgacccatagccacacagtgggaaggccaaggacctgctccccaggacgctgggccagggagaccgcaggcacacgggacagccacaccagagctgcatctggagaaggggtggggggtttcctctcgccgctcctcgctattctttccctacattgttccgttccgtgctcccagttcccaccccactccctccacccggacgccggcggttcccaggccccggagccggggtgcattgggggtgggggtggggtagagtgaggggcctcgtgaagagcgctgcgggccaagaccctcttgcgcatgtgacgagagcgcacgagtgtgggagcttcggcctgcgctcacaggcgtgtgcgtggggaagtgtttgggccgccgtgtacacagcaggcacgccataaacgcttcttggatggctccatgcgagggaagggagggagggcagagttcaggccctacagggaggaaaagggaggggcggaggcctggctttaggtttgaatctccgcggcttactagctccagcagctcagcaaaagcgtgactcagtttccctcgtccataaaagggaaagccgaatcgccctcccacgtgtcgaggtgaaactagacagtgcactaaggcacttagcaaaacgcgctgccttgagaacccttattacgccttccttccttccacctcaccccctggccagacactctgggggtggagaggggcgctgacccaggccccagacgcccctcccgtccgccctccctagcaggcaggagtcccggctttcccgttccttaaattggataattggagacagaggcgggtgctcgagacggagaaatccccaagtgggcgaaaggcaaggggcctgtcctagtttccctgcactgggggcccccaccctcgccagcgctccctccggtgcgccctgggcgcgcagtctgtgcgctcgggagcccccagcgccggctgtcgaccccctccagagcccggcggtgccagcctccctctgttgcccgccaggcgcggtgtctgcggccgccccggcaggaggggttggggggtccgggccggcggcagctccggcggcgtctccctcctccaagcccctggcggcgggcggccgggccgagggcggggcgtctgcacagaccctccttttgtgagcggcgccttccccgggcggcctggcgcgcagggctcgggcactgcgccagggcccggaatagcctccctgcccggccgcccgccccacgccccggcggagccgcctgacctgcccggtcgggcgcagaagagcctggggccgcggtggcacaggaaccgggtgcgtgctcagctgcacggggctgcagccgctactctccgctgggccggcactggacgcgtgcagccgggcctactgtgcgcagcccgtcttttgtgtgaaaacgcccgctgtgtgcagatctccgtcttcgtgcagggcctactgtgcgccgcaccccccttccatgcaaagcctactgtgtgcagaaccccatttgcctgcaatgcctactgtgtgcggcccctctcctgcgtgcaaacgcctgctgtgtgtgacccttttcttgcatgcaaggcctactgtgtgcagagccctaccttcttgcagtgcctacagggtgcagcccctctcctgcgtgcagacgtccactgtgtgcagatcgctgtcttcgcgctgggcttactgtatgcagcacctctcttccatgcaaagcccactgtgtgcagagccccacctggccgcaatgcctactgcgtgcagacacccagatacatacaaaaccgactgtgtgcaggcatccacctacatgcaaacacctgcacctgcactcgtgcaaacacccaccgtgcacaggcacccactgacaaacattcatgtgaggagcccccaagctcccacactcccaaacggccttgtctttttgtctttttttttttttttttttttttttaagatggaatcttgctctgtcgcccaggctggggtgcagtggcacgatctcaactcactgcatcctccccctcccaggctcaagcgattctcctgtctcagcctcctgagtagctgggactacaggcgcgcgccaccacgcccagcttgtattgtatttttagttttgtatttttagcagagatggggtttcaccatgttggccaggctggtcttgaactcctgacctcaggtgatccacttgcctcggcctcccaaagtgctgggattacaggggtgagccaccgtgcccagcctcatttttttttttttttttttgagatgaagtctcgctcttgtgccccaggctggagtgcaatggcgcaatctcagctcactgtaacctccacctcctgggttcaagaaattcttctgcctcagcctcccgagtagctgggattacaggcacctgccaccacgcccggctaatttttgtatttttaatagagacggcatttcaccatgttggccaggctggtctcgaactcctgacctcaggtgatctgcctgtctcagcctcccaaactgctgggattacaggcatgtgagccatggtgcccggcacaaacagccttgtccatgcaagcacaagcacccacatgtgtctaagaccctggtgtgcacacctgcactctgacctgcactgcgtgttcccactagggaaatgcaaatatttctaagctccaatgctcactccacagagccccgaggcctgtgaatacccgcggtatacagagatccatgaggtgccagtactcaaactgtggaagcctgcacgtgctgatttggggtgggagtagagtgcagggaactcatctgtgtgcagcccctttctctgggccctttgtgtgcacctcagtttaccccacctgggtaagagactctgccctgctggagtctcttctggttctgactttgaagggctccaaggtgtggggggaaagggggctgcattccctctctgctgtgtgcctctgggtggtggattcaggctagcagggctgggggctgggcctccaggcccttcccggaagcccgggaagcaggtgcaagggtaggcagtctccacgggcagggcgccagaccttggcttccctgaaactgggcacagcagctgggagaggtttccgggcccgcctggccccacctggcccctggcactttcggaagatgggcggggcaggcaggcaatgccaaggacgggcgaggcccagcctgcacaagagtcgccggtgaacctgtgcgcacacacgggtgtgcatgtatatgtgtgcacacgtgcatgggccatgctgatgtgagttctgtaccccacctacaaacgggtgtgctcatgaacacgtgcagggtcaccctggcacatgaaccgtgcagcacaggcaatggcccagcggtaattcacccatagcggtgacaggaaagagatgcttgtctgctttgctcactgtgcgtctccagcaccccacagctggttggcacttggtgaatatttgctgagtggacaaatgagtgaatacacgaacacatcattttgcaaatatgtactgaatgtctctactctgcataccagacatttgcacatcttcaaacaacaaaaagatcctgggaaacgacattctagacatccacggggtgggaataagcccacgcctgagagtacacactcatgtccaggaaacacctgagtccactttgatttgttcacctccagaagccagagcctggtgcccacacacaggccctcatgcagagacacgcattttctttcttttttttctttctttctttttttttttgagatggagttttgctcagttgcccgggctggagtgcagtggcgcgatctcggcccactgcaagctccgcctcccgggctcacgccactctcctgcctcagcctcccgagtagctgggactacaggcgcctgccaccacgcctggctaatttttcatatttttttagtagagacggggtttcaccttgttagccaggatggtctcgatctcctgaccttgtgatctgcccacctcggtctcccaaagtgctgggattacaggcgtgagccactgcgcccggccgcattttattttttcttttctttctttcttttttttttttgagatggagtctcgctccatcgcccaggctggagtgcaatggtgtgatctcggctcaccgcaaactccgcctccggcttcaagtgattctcccacctcagcctcccgagtagctgggattacaggtgcatgccaccacatctggctaatttttgtatttttagtagagacagggtttcaccttgttggtcaggctggtcttgaacccctgacctcaagtgatctgcccaccttggcctcctaaagtgctgggataacagacgtcagccaccgtgcccggccaggattttggacacacaaatatcccctctcttcccctgcaagcctacctgtgctacccaccccagccatcccctcctgaggtgtctgtccttccatgcctgaaggggttcatgggagtgtggggagtcctacaccccacctgtgattttccatcatttgagttctcctatggctcagaccattgcctgcaggaagctccagaaacagccagggttggtgggattagaactgcacaggtggggaggtgatgcccatataccctaagaaactatccttccatttcacagccggagaaaccgaggcccagagacaggaaggtcttcttgttgagctaagaagagaaatagagggatgataaacggatgccctgactgggccccctcaaccatctcctcttgcagccagaaacagtaggttcctaccgccaacaagggtggggacaggaaggtgggggaccagggtgggaggaggagatgggagtgaggccctggggggaggtggagcctatgtcctggagacagacacagaggtgggcggtccggagacacccacctcctcagacaggcacgggctctggcagctggtgacagagacacaatctggggcacataggcactgtctgtccctcctgccgccgatcttcctccccagcctctgatggggattctaggggctgctggggcccctgcaattgttttggcatgagtgtgcatacctgtgtgtttgtgtgttgggtgcacatgctttatttttattttcattttatttattccatttcatttcatttatttcatttcatttcattttttgagactgagtcgtgttctgtcacccaggctggagtgcagtggcactatctcaactcattgcaacctccgcctcccaggttcaagcgattctcctgcttcagcctccggagtagctgggactacaggtgcccaccaccatggccggctaattttttgtatttttagtagagatgaggtttcaccacgctgatcaggctggtctcaaacacctgacctcaagtgatccgcccacctgggcctcccaaagtgctgggattacaggcataaaccaccgcgcccggcctcactgagcatgttttgaaggcgagtgcgttcctcttgactgctgaactttcattctatgaaccgacctccgttgacctgttcccctctgaatggaggggtatttgagctcttcccaggttttggtgatgaggaacaaagctgctacgtgcatttacctcctggtctctgtgtgctcctaagttgtgtatttctttcagatagtaccaagagaagtgaggttgctgggtccccgtaaccttatagggtaaatactattattacatccactttgttgatcgggagaatagacgccgccaggcctcctgtctctcgctttcacacaaaggcacatacggcagacacggacccccatcactcatccatcactttcccatcactcaccgcagaccctccaggacccacgcagaaacccagggctcccccacggtgcacgcagcacccaggctgcccgccctccacccagggccgcgtcacgcccgacacccccggaacagacgcctatgaggcctgcagctccagacgggctgcagacacacagcgatttgttcatctttccagccaccccgtctggtcctgacagtaattagctcccagactggtggggagacggtgaacagcctgagagtcatcgcccacggctccacgcccacaggccacgggcaccgggagagagggtgaatgagtgtgtgtgtgtgtgtgagtgtgtgtgtccggaatctgtactctccagccagggctccccatcctcctgcaaagggccagcaccgtgcacgggtacccacggcgccttccaaggggaacgtgcacaggcatacccactgttcattccacgaaggatcgtgcacacgcatgcctacctttgcatttcacgcgggattgtgcacacgcatgtccaccgtgccttccacgcgggatcgtgcacacgcatgtccacgaactcctgcacacctacacccaccaggcctgcccatgcgatgcgtccctgcagacccactgtggacgcctgcttgtcggcgtcctgcgcatcccgcgtgagtggagtgtgcactcgtggagggggcgactgagtgcggggcaagcgcaagcgcaagcacactgggctcgcggagggtggagagaggccgtgcgcgttcccggggctggcgcggaggtggggtcagcggcgcgggagaacgccccgccccgctaccgccagcccggaagacccacggcggcgggcgctggcgtcacgggtttccactggggccccggcgccggggccgggattccctggcgcaggaacgcccgtgacggcggcgcctgcctgcgtcggccacgctgggaggtttgagcctggggatgacatcagcccctgcgtttctggagctggcccgggcgggacggggacttggagaaagcagtgacacccactttcgttgactgccaacccgtgcagagcgcttagtgcgtgtccgaccgtgagctgagcgctgtgatgcgggtgctgttaatgtcccattgcacagatggggaaactgaggccggcgcactgcccgccccgccgggcccccagagtgagggcccggggctgggagcagccttttcccagcgccctctgcagtgtagagtcccaccagcttgtctcccgctctctcctgcacaagccggctcagagagggtctgcgggtgtcctggcaccacccagcaagttgggtgctgcagccagctctgtccatacagttggtctctgcccagctgcggtggccaggggcggtgcctgagccagggcgcccgggcggcccggtggggtgtgcccagccgctgccttcctgctgacgccggtgccaagggatctaaatatagcctgggaggaggcaagggctatttttaacgcgagtggcttggcccctcccagttcccgggtcaggagccctttggtccaggattttggggaggggcaggggcgagggggagccaggggccccacacccgcctgggcctgcccctctgcccacacctggccctggaagactctaggggacgaagggccgtagagggagggcagggtgggggggctgtcgcaggtcacctttcttaaacgccacctcctctctagctgccgaccagccctggccttttgttgggcccagagactgctttctattttgggaaggtgttggaataatttccttggctatttttagccggttcggggattcctccactcaggctggccgccctgcctctcctcctcctcctcctcctcctagtcgtcttcctcctcccggcagacccaagggcggcctccttcatggagggcagtcagggacacacagtccctgagccagacccagaatggggagacccctatatttcctgggtcggggagggaagggagctctgaagggcgttcccacgttccaggtgagcaggactttcagacctctgggaatccatgacgccaggtatctgaattctgtctccagggcagggtggggcgacccagcagcctctgacctttcacctcctttcagggttgtcacaggaaagtggcctgctgagaacagaccttgactcccacatccctaggctaggggctcccatgttcccaagaggaagatcagtgtgatgagggtaaactgaggcacagaggggacactgggatgggacacatcttgggctcattccctgatggtttcatttccttccacattctacctttgtttttaatttttttttttgattgttttgagacaagacggagtctcactctgtcacccaggctggaagagtatgcagtggcacaatctcggctctctgcaacctctgtcctctgggttcaagcgattctccagcttcagccccctgagtagctgggattacaggtgcacgccaccatgcccagctaagttttgtatttttagtagagacggggtttcaccatgttggccaggctggtctcgaactcctgaccgcaggtgatccacctgcctctcctcccagagtgataggattacatgcgtgagccactgtgcctggcagcagcgccgtcatagcttatggcagccttgacttcctgggctcaagtgatgcccccaactcagcctcctgagtagtgaggcctatataggcatgtaccacgatgactggctaatttttgaaaatttttactagagatggggtctctctgtgttgcccaggctggtcttgaactcctgggctcaagtgatccttccaccttggcctcccaaagtgctgggattccaggcgtgagccaccgggaccagccctcatgctgccttttaacagctaagcaaccttggggcgatgacttcacctctatgtgcctctttcaggaaagggggtgacagtcacatggactaatggtaaataggtgagggaatatatgaaaggtcttagaacaagctcctggcagaatggagctgagggtcctggaaaggacgctgggatatggctggctgcaggacagaggaacatcccgggtgctggctggttccacattttgagaggacacacccccttacttatcccagtccgtgaggctggcgagagtgaccccggcgtttcagatcaggaaactgagaccctgggataatttcccaggcccagggtctcatgacagctgacacacaggaggccagcacagtcccctggctcccccgggccgtattccacagctgctccgcattctttcaccggtgccctcactcatgcagcaagcatttgtgagcaccgtatgagtttcctcccgctgctgtaacaaatcactgccaacccagtggctggaaacaacacagagttattatctgacaagtctggaggccaggaatccaaaatcagtctccctgggctccaaatcaagctgtgagcagggctgggccctcctggaggatccaggggagaacctggcttccacgtttgccagcatttagaggcagctgcttccctcagcttggggcctcttcctccacgttcatggctggccgtgcagcctcttccagtctctgactctcacctcccaccacctcttatttattattattattattattattattattaattttagtggagttttgctctttttgcccaggctggagtgcgatggtgccatcttggctcactgcaacctccacctcccgggctcaagtgattctcctgcctcagcctcccgagtagctgggattacaggcatgcgccaccacgcccagctaattttgtatttttagtagagatggggtttctccatattggccgggctggtctcgaactcttgatctcaggtgatctgcctgtcctggcctcccaaagtgctgggattacaggcataagccactgcacctggttgtttgtttgttttaagaaaaatctttttcactgtgcaagttgatttttttttttttaagagatagggtcttgctccatagcccaggccggagtgcagtgatgcaatcatagctcactgaagctgcaaactcctgggctcaaggaatcctcccacctcagcctcccgagtagctgggaccacaggcactcaccaccatgtctggctaattttttaaaattattttttgtagagtcggggtcttgctatgttgcccagactggtctccaaatcctgagctcaagtgatcctcatgtcttggcctcccaaagtgctgggattacaggcgtgagccaccacgcctggcccgcaagttgattttttatgagtatattgcttctctccaagggcggatggcctgaccgggataagacccgtgaacagatagtaaatgtgggtttggcatttggcaggaaatgcttgtggaattcaggaggcaactgtcatttatctgtcctgtatgccagctggatatcaagtacatttctgtatcttaagaccatcagccagttttatttattggatgcttattaagtacttaatgccaatttaatatcttcacagccaccttagtgctaataatcatcctcaccttacagatgaggaaactgacatggagccatgacttgtcgaaagtccccggccgggcgtggtggctcacgcctgtaatcccagcactttgggaggctgaggtgggtggatcatctgaggttaggagattgagaccatcctggctaacacggtgaaaccccgtctctactaaaaatacaaaaaataagccgggcgtggtggcgggcgcctgtagtcccagctactcgggaggctgaggcaggagaatggcgtgaacccgggaggcagaacttgcagtgagccgagatcgcgccactgcactccagtctgggcaacagagagactccgtttcaaaaaaacaaagaaagaaagtccctcagccaagttggtggcagaagctacccagccggttctgtttccatttggccttgctgctgcctcttgcttgaatgctttcagggaccatgcaggcacactcctcagctatccccttgttctggtcctccagcaacagtcttgggaagttagtgggttccacaatcctgagcccaagctcagtgcagctctcccaccctcaggtgtcttctgcaaacaaaggacctcccagagcccacggagggggaatgtttcgaaagtgtgctggccaggaaagagaccagacgtgaaccacacttcctccctccctctgctccagatgtctgcaccagaggtggtcgggaggaggctgccagatagacaagacaacaggagcgttggaaaagggcggcttccactactacctcccaatgtggggatgtgactggaagagcagctccatgacccaaggatgggactttggctttcttttatccccaagccagcccgtgacatgccttctgctagatggatggctgtctgcagctctgaccctgtagttttgcgcagattatctgtcccatgaaacgtttagactctggcctgagaattcctcctttcgtcttctttttttttttttttttttttgagacggagtctcgctctgttgcccaggctggagtgcagtggcgcgatctcagctcactgcaaccccccgccccccaggttcaagcaattctcctgcctcagcctcctgagtagctgggattacaggcacgtgcaagcatgcctggctaattttttgtattttttagtagagacagggtttcatcgtgttagccaggatggtcccgatctcctgacctcgtgatccgcctgcctcggcctcccaaagtgttgagattacaggcgtgagccaccgcgcctggctgagaattcttcctttctagaggccactgcatgtggccttcgaggggaggggtcgtgggacaggagtagttaccaaaggcagaacccttttagattcccctgattctcacagagtgggctggaggcacgtaaaccacctgataatgcaagccgggttttcctgaatgttctctggagtaggtcgctcatcctaggtgaaagcagatcttttccctaggatctgaggctttagacgcaggaattgtcactgccatttgctccagaatcccagtgctgctccgactgtaattgctcattttactgatcaattgagacagacaaatgcagttagaagacacagggatgacctctggaaggtccaagggaccagagtgaatgttgtcgccaaagatcctgtaagtgagaggcggagccggggccgagactggacacctgtcagcaagctcattcccccaacgacaccctggcctgtcttggcgtacgctggcagtctgcgttctgaacaggggagatgtttctttctcaaccttggcttggagttctccccagagtgataaatgttggcgagaaagagcggcacattcttttttttttttttttttagacagagtttcactcttgtcgcccaggctggagtgccacggtgcgatcttggctcaccacaacctccgcctcccgggttcaagcgattcttcttcctcagcctcccgagtagctgggattacaggcatgagccaccacgcccggctaattttgtatttttagtagagacggggtttctccgtgtgggtcaggctggtctcaaactcctgaccacaggtgatccgcccgcctcagcctcccacagtgctgggattacaggcttgagccactgcgtccggccaggagtggcacattcttagggccggctcacccgtgaggccctacatcactctttccactgtaaaccctgtggtggctgctacagatcagccacaagtgcagaaagcgctgaacccgacgcggccacccagggggagcccccatcccggagactttgctgtgccctcccaggcccctcgtgggattttttctcttttctttggatccctggcgggggtcggagagggtgtgggagggcgcagaataaaccctgagcctgcctcattggctgcctgggctccagagccctgccgttgcttgtggaggactttctgggaatcacgtggactggccagaagggctgggaactggagagcaggcaaggattctggaagaggggagatcccagtgggagggatttgaggctggcagtgggtcagagacagaagtccagatggacaggtttaaagtctctgcttaaggcggggcgtggtggctcacgcctgtaattccagcactttggcaggccaaggcgggtggatcacttgaggtcaggagtttgagaccagcctgggcaacatactgaaaccccgtctctactaaaaatacaaaaattagtcaggagtggtggcgagcgcctgtaatcccagctactcaggaggctgaggcaagagaatcacttgaacccaggaggcggaggttgcagtgagccgagattgcgccactgcactccagcctgggtgacagagtgagactctgtctcaaaaaaaataaataaaataaataaataaaaataaaagtctctgcttagataagcactatgcttctgctgcctgtaaatggctcttttaccctttctttagcatgaaaacaaattttctaattattataaacaaaatgtgtgcaatgtggaggctggctgttggtactcattatccttctcttgcttgacgtcaagtgaaagataaattgttgcctctggcccttcccaggaccaaagagaaggcacgacgtcaaatgcatctccttggatttgggaggcaatgtatacttaatttgggtgtgcttccccggcctggttgaggaggccatcgtgccctccctccatcagtctgcgctctgtggcatctgtggcgtggacccttctttgctttgcagaggcagagtgtctgcattcggcatcgtacccagcccagtccagagtttacagtaggggtcacccttggaggtctgtgttctgtgggttttacccaatgcatgaggttacatatccaccatgacagtgtcacatacagtaatttcactgctccccaaatcctctgtgctccacctattcacccttatccccgcttccttcaacctgggtaacccctgattttttttttttttttttttttttgatggagtctcattctgtcacccaggctggagtacagcagtgccatctgggctcactgcaacctccgcctcccgggttcgagcgattctcctgcctcagcctcccgagtagctgggattacaggcctgcaccaccacatccagctaattttgtattttcagtagagacagggtttctccatgttggtcaggctggtctccaactcccgacctcaggtgatccacccgcctcagcctcccaaagtgctgggataacaggcgtgagccaccactgatgtttttactcatgtatagctttgccttttgcggaatcttttctagttgggatcgtagcatggaggctgtgaaggctgcagcttctttcacttgtttcccggtgtattccagatttcaggagttattcgtacaactcggcttgtgacttcacatcactccagcctcttgtttctgttgttatgtctccttctctgactgaccttcctgccaccctcttacaaggaccctgtgatgacattgggcctacctggataatccagacaagatctctaattttttttttttttttgagacagagtcttgctctgttgcccaggctagagtacagcggctccatctcggctcactgcaacctctgcctcccgggttcaagccattctcctgcctcagcctcccaagtagctgggactagaggtgcccgccaccacgcctggcgaattttttgtacttttttttagtaaagacggggtttcaccgtgttagccaggatggtctcgatctcctgacctcgtgatccacccgccttggcctcccaaagtgctgggattacaggcgtgagccacccgcctggcaatttttaattattattatttcttttttaaaaatatgaaatgcttcatgtcatccttacgcaggggcaatactaatctttgcatccttccaactttttgaatatgtgctactgaagtgagcatgttataagggtaaggttttgtttttttgttttttttttttaattttgagatggagttttgctcttgttgcaatgatgcgatctcatctcactgcaatctctgcctcccaggttcaagtgattctcctgccttagcctcctgagtagctgggatcacaggcatgagccaccacgtccagctaattttgtacttctagtagagacggggtttcgccatgttggttaggctggtctcgaactcctgacctcaggtgatccacccaccttggcctcccaaagtgctgggattacaggcatgaaccactgtacccggccagtaaaggctttaaatgtttaatgacttcaatctgttgtgactttttttctgtcctaatagcttaagcaaaccccttctggaatatctgaaaaatatgttggtgggtgtatgagacagggccgacttcatgggtgtgcgacttgtgagtcacccagggccccatgatcagaagcgctgtgtggtcggaagggccccacccttggtttaatgctgctgtcattgtcttgaaattcttaaacatttttgaaaaagggccctgtgttttcattttttactgagccctgcacgttacatggccggtcctggtatgagaccctcttatgctcccctgcagagcccctcgacctcacccactcacgggctagctccgtcaggtgttgacggatgtcactcaggtgtgagctctgcacctgagctcccccctgcacacaggcagccacaaccagtcagtgcagaggtgagcctgtggccagtgaggagccggtgagtcaacctcctcccgcctacgggccctgagacgccggctccgtgagcttgcggggtcgagggcgcctatattaagccaaggctgaggcagtgacacaccctcttatgggcctgctctcgctccctgcttcattgtcctggtctctccctctcgtatggaggatcagactggactcccccagaaaacaagagcatatgaaccttctgtctcaggctctgcctctggggagcccaagctatggttggctgaatagcagccggcaaagatgtccttgttctaattccgggagcacaggggtatgtcaccttccacggcaacagagactctgcaggtgcgattgagtgaaggactctgagatgggagagcagcctggatgatctggagtccccagtgtcctcacagggtccctcataagaaagactagaagaggctgcgctcctggctgcgaaggtggaggaaggggccccgagctgagggatgtgagcccctcgacgctgggaaagacgaggagttggattcttttttttttttttaatttaaaataatttaattttaagtctgggatacatgtgcagatctaaatgatagtctaggagaaaatatttgcaacacctataacagatcagaattcccaagcctgcaggtttgttacataggtaaacatgtgccatggtggtttgctgcaatcaacccgtcacctaggtattaagccccacatgttgctgggcgcggcggctcatgcctgtaatcccagcactttgggaggccgaggtgggtggcttgctcgaggtcaggagttcgagaccagcctgacccacatggtgaaaccccgtctctactaaaaatacaaaaattagctgggtgtggtggcggacgcctgtaatcccagctactcaggaggctgaggcaggagaatcacttgaacctgggaagcagaggttgcagtgagctgagattgcaccattgcactccagcctgggtgacagagcgagactccgtctcaaacaaacaaaaagccccacgtacgtcagctctttatcctggagccctccctcccttccccctcacctcaccccccagcggccccagtgtgtgttgttcccctccctgtgtccatgtgttctcagtattcagctcccacttataagtgagaacatgtggtgtttgattttctgttctgtgttagtttgctgaggacaacggcttccagctccatccatgtccctgcaaaggacatgatcccgttcctttttgtggctgcataatattccatgctgtgtatgtacaacatttttgtcttttgagacagagtcttgctcttgtcacccaggctggagtgcaatggcgggatctcagctcactgcaacttccacctcccgggttcaagcaattctcctgcctcagcctcccgagtagctgggactacaggtgcccaccaccacactcagctaattttttgtattttcagtagaaacagggtttcaccgtgttagccaggatggtctcgatttcctgacctcgcgatccaccctcctcagcctcccaaagtgctgggattacaggcgtgagccaccgcgcccagccaggatgtatcattttaaatcttagtttgtggaacagttttctaactaagcatgtcacaaaacctagagaatcaagaaaggaacatgttgatgagttttgtgtgccagacataaaaatctaaatgatagtctaggagaaaatatttgcaacacttgtaacagaccagaattaacaagcctgcgtaaaaagtgtctttcatcccaaagaaatacgcaagtgatttaattaggaaataaacagactgggtgcagtggcacacacctgtaatcccagcactttaggaggccaagataggaggatcacctgagcccaggaattggagaccagcctgggcaacacagcaagaactcatctttaaaatttttttttaaattagctgagtgtggtggtgcttccatgtagtcccagctacttgggaggctgaggtgggaagactgcttgaatttgggagatcaaggctgcagtgagctatgatagcaccactggactccagcccgggcgacagagccagcaggccctgtctcaaaaaagaaaaaaaaaaaaaaaagaaaagaaaagaaacaaaaagtatgaataggcattttacatatgagggaataaaaatgtctcataattctagggaccggtacacacacatatgctggaatgcacacacacatccaagtgtgtgtacagaaattaatatgtaggctgggtacggtggctaatgcctgtaatcccagcactttgggaggctgaggaaggcggatcacctgaggtcaggagttcgagaccagcctgaccaacatggcgaaatcccgtctttcctaaaaatacaaaattagctgggcgtggtgggtgcatgcctgtaatcccagctaaatcccagctactcgggaggctgaggcaggagaatcacttgaatccgggaggtggaggttgcagtgagccgagaacacgccattgcactctatcctgggcggcaagagtgaaactccgtgtcaaaaaaaaagaaagaaagaaacatgttcataaggcactttattgaaagatagtgtgtaaaagtagcaaaactcagaaataatctaaatgtccatcaatagtatataatttttttttttttgagatggagtctcgctctgttgcccaggctggagtgcagtggcacaatcttggctcactgcaacctctgccccccaggttcattgcctgcctcatcttcctgagtagctgggatcacaggtgcctgccaccatgcctggctaatttttattttttattttggtatttttagtagagacggggtttcaccatgttgaccaggctggccttgaactcctgacctcaggtgatcctcccgcctcggcctctcaaagtgctgggatttcaggtgtgagccaccgcgtccggctaagcatgtaaattaaattactctggagttgttaaaatgcactgatttttaaaaaattattatttttatatcttttttgttttccttcataaaaatgcaatgacttagcaagctgtcggtcataggaagttaagcgaaaaaaaaaaaaagctaagccagcctcagagcagtctgtgttgagtgagtccagttttaaaaacaaatggcaagtgttggtatgaaatagtgccgatctccattacagaagacggtcttgggcacatgtgcgggagccctacggtctggctgaaaatgctgcccagttctggccgtaccactttctagctgtggactcaagggagttgtttaccttctgtcagtccatgtttattcatctgcacaatcaatgcgtagaaccatagcccttacctcacagcgtttccgggaggatcagatgacacaatccgaggaaatgaaccattattgctacttactgtcactgctttcttctgaggccaacgtttgggcacgcctagaagtttgaaggatttgcctcagctgtgaacaaatggtggctacaggtgctgagaatgggtctgaagaagggcgtggagggatcttccctcccctcccctccccacccctccccttctctttctctctccctccctccctctcttctttttctttctctctctcccctccctccctccctctctctctctttctttttttctctctctcccctcccccccttctctcttttctttctttctcttttttgacagagtctcactttgtcgcccagtctggagtgcagtggtgtgatctcagctcactgcaacctctgcctcccagattcacgccattctcctgcctcagcctcctgagtagctgggattacaggcgtgcgccaccacgcccggctaatttttgtatatttagtggagacggcgtttcaccgtgttagccaggatggtctccatctcctgacctcgtgatccgcccgcctcggcctcccaaagtgctgggattacaggcatgagccaccgtgcccggccgcatgtgggtttttcaatggctattatttaagcatcttccatgtcctttgtgtgtgtgtgtgtggtgtgtgtgttttgtgttttttttgtttttgacaagagtctcgctctgttgcccaggctggagtgcagtggcgtgatctcagctcactacaacctccacctcccaggttcaaacgattctcctgcctcagcctcctgggtaggtgggactacaggtgcatgccaccacacccagctaatgtttctatttttagtggaaacggggtttcaccatgttggccaggctggtctcgaacttctgacctcaggtgatccgcccacctcagtcttccaaagtgctgggattacaggcatgagccacagtgcccagccaaggatgacttttgaatgctgtatgattttatgtaacttcttcttcttcttctttttttttgagacggagtttcactcttgttgcccaggctggagtgtaatggcacgacctcagctcactgcaacctccgcctcccaggttcaagtgattctcctgcctcagcctcccgagtagctgggattacaagcatgggccaccacacccggctaatttttttgtatttttagtagaaacggggtttctccatgttggtcaggctactcttgaactcccgacctgaggtgatctgccagcctcggcctcccaaagcattgggattacaggcgtgagccactgtgcccggcctattttatgtaacttctatagttattatattttgttttggggaccaggaaaagaaattgtaaacctttttggcttatttcccatgtctttttttctgtgcattaaaacaaaacaaaacaaataaaacaaggctgggcgtggtggctcacgcctgtaatcccagcactttgggaggctgaggcgggcggatcatgaggtcaggagatcgagaccgtcctggctaacacggtgaaaccctgtctctactgaaaatacaaaaaattagccgggcgtggtggtgggcgcctgtagtcccagctactcgggagactgaggcaggagaatggcctgaacccgggaggcggagcttgcagtgagctgagatcgcgccactgcactccagcctgggcgacagagcgagactccgtctcaaaaaacaaaacaaaacaaaacaaaaaacccattgctaataatgtgtacgattttgcatgtaagtttttcagtgactgtattattaggctggtgcaaaagtaattgcgattttgccgttaaaaaggtgaaaaccacaactacttttgcaccaacctaatatttaagcatcttccatgtccttaaatacaaatcgtaatggataaatacaaggtggtctgtctggaaaaaggaatattactcagccatgaaaaggaacgaagctctgacataggctagcacctggatgaaccctgaggacatcacggccagggagaggtgccagacataaaaggccacacaatacatgatcccatttatgtgaactgcgaaggacaggctaatccaccgagacagtaaagggattcacggtggcctgcggctggggaggggtggagagtgactgctgatggggatgggatgtctttggggtgatgacagtattctggaactacacagaggtgatggttacacaactcctacattttacattttatttaattaattaattaatttatttatttctgagacggggtcttgctcttgttgcccaggctggagtgcagtggtgcgatctcggctcactgcaacctccacctcccaggttcaagcgattctcctgcctcaacctcctgagtagctgggattacaggtgcccgccatcactcccggctaatttttgtatttttaatagagacgggctttcaccatgttggccaggctggtctcaagctcctgacatcaggtgatccacctgcctcagcctcccaaagtgctgggatagctgtcacgagccactgcgcccagccgccaaaacactttcagggaaggttgtacccgcgtagaggtcctttggcagcatgtgacagcttgtatcctcctgtgttgctgccagcatagagcccaaaagctcttcttaatctttctttgttttgttttgttttgagacagagtctcactcttgtttcccaggctagagtgcagtggtgcgatctcggctcactgcaacctctgccttctgggttcaagcaactctcctgcctcagcctcccaagcagctgggattacaggcacccgccaccatactcagctaatttttatatttttagtagagacagggtttcactgtgttgcccaggctggtgttgaactcctgacctcagatgatccgcccacctcagcctcccaaagtgctgggattacaggtgtgaaccattgagcccagccttcctcctagattttcttttcttttctttttttttgagacacagtctcactctgttgcccaggctggagtgcagtggcgcaatctcggctcactgcaacctccgcctcctgggttcaagtgattctcccgcctcagcctcccgagtagctgggactacaggagcccaccaccacgcccagctaatttttttttttgtatttttagtagagacaaggtttcaccatgttggccaggctggtctcgaacacctgacctcatgatccgccctcctcagccttccaaagtgctgggattgcaggtgtgagccaccgcgcccggccttttttttttttttgagatggagtcttgatctgttgcccaggctggagtgcagtggcgtgatcttggttcactgcagcctttgcctcttgggttcaagcaattctcctgcctcatcctcttgaggagctgggattataatcacttgccatcacggccagctaatttttatagttttagcagagacgtggtttcaccgtgttgaccaggctggtctcgaactcctgacctcaggtgacccgcccgcctcgggcttccaaagtgctgggattccaggcctgagccaccgcgcccggcccctcctagatgttctaagtacaaatccgaaagcccactgggcctgaacgtccctggtttgtggtgctgcctccaggggtcccctcctgttacctcttccctgggccggtgaagggagggtggacgggatggtgtggggccgcgggtccccatgcctggagccaagcctggggcatctgcttgcatgctaggagctccctccccagcaaggcccgggccagagagagaaggaacagcccagagccaggagaaaagggagagtgaggctttttattgtgtatgaattcacgtggtatcgacaactccacacaatattaaaacactgcgagaaagtgggtgcggcacacctggaattttaaaaaagtcagaaataaaaacaaccagacatcccaatgcagatggcatagaacctgctagaaccacaggcggcggctggaaacaggagacaggtctttacgaaggttagatgggcagcggttccgtggacagaggaggaggcgcggctggccggcatatggcttctgtgcagagggcctggcctcaggccgtggactttttaataagtgaccccttgaggaagggcgtggtggctccacctccacccggaagcccccccgggtcactcacgggcggacaggtgtgtgacggccctctcctacctgccccagaacttgggcaggacgggctgttaacttggagatggatgcgtggcctggaggcctagcgttgcgcctcggacacggtggccggcccgtcaaagggaccacgcagaaggagggaaacaggagcaccttccgccctggcccagccgccccgtttatgtccccagaggccagaggtcgcagctgagctatctgtgcttggcctggggttacccctggggagggtgggagaggggtgagggttctggctccttcctggagagaggagggcaggggaggcggagctggtccgggaaggtgcccaggtgggtcacaacagggtcggggcctggcccgctgtggcccttcacctggctactggtgtctcgctcagcagcggggaaggcccgtgggagacccaggctacagaaggagaaacggccttctctctcccacccgacgctgccttgtgtgtgtgcgtgggtgggggtgagtgtccttaactctcttttcccctggcgtagctgagagaggcttgtccccccaaggctagagctgctgctgccacccccgcccgccagctccccgtctggaggtgcacgcgcgctcctggaaacgcccataaaacatgcgttcaccccagggattcccggcagaaaagcacatgtggcggtcggtgtgtgcactcgggtgccacgtctgcaaaggtattttccacagtgtggtcactgaagtctactcaagaaaaaaaaaagtggagaattttttttttaatcccccaagctagaaagaaacccacaggcttctggcaatggccacctccctggggtccgggagatggtggggtctggacagctcagggaacccaaggccctgtggacagtgaaggagaggccagcctgtccttcccctccccgagcctcagtttacctggaacgctcagcccgtttaaccccaccatctgcaccagcctaggagccccggctgcctggggctgcgtctctgcagcagcctccgttccctgctggcatttctggggtcacattgtgaggacacaccagtggggccgggcttggcacagctgtgccccctcctccctctgccctggcagcgggggctcggggattaaggcctcttttaaggaaaaacggggtggggtgtgtttgttcccagttaccaagatggcttgttggaaagggtggaggcaggcgggctctccctgcctggggtcctcccagggtctctggaacaggcttttgtcccttcctgccattcctgctatgcgtggtggggacgcccacaccccaaaccctgccggctcccagcccaaccacaggaggctgcagtctccgggagcctctggggctctcccgggccaacagcaggtttggcgggtagggctccccgaagccccagccctcccggacctgccgtagagagctgggtgccgggggtggggagcccggctgtggcctgtgggagctgcccgaggttgaggagtggaggtcactcccccgacacctgcacacacacccggagccctctagccttggcgaggtgggaaccctggcagtcaccagctcaggaagtgagccaagcagggatccccgcctcacgggcctgcacggaggacctgggcggccgtccaggaaccctctcggcacgggttcttagacgcctgtctccactggggccggagggacaggactaggctagttttattctactacttgcttctaggccagccccgtggagggggtcggggcggccaggcctcctgcgatcagggctgcgtggggtccatctcaggtgtggccgcaggtgatgccggcaggccctggaagatgtggctgcacctgctcccgtccgtgccgcagaggaggacgcagtcatctttcagaagcctccccccgaccccatgacatcttcgatttccacttgccgctgggaggagtggcccatcctgcgtctaaggcatctcccggcctcagacagccgtcctgggttgcacgggggtggaaaagcaaaaagatcgggttcgagcgacagggtaacgttttgagcggacgttttgatctccgggacaacgtctcacctcccagagtccttcagagtcactccaagatcatggaacaattttgtacacacagcagcacagggtagccccacccgccctgccgcggctccccagcctgcattttctgtttgaaaaacgtctatggtggatgccagagggtaggacaacctggaagagccaaggatggtcaaagcctctcccagccacgcggatgcctcatgcttaaaacacactgggcgcggtggctcatgcctgtaatcccagcactttgggaggccgaggtgggcggatcccgaggtcaggagtttgagagcggcctggccaatacggtgaaaccccgtctctactaaaaatacaacaattagccgggcgtagtggcacacgcctgtagtctcagctactcgggaggctgaggcaggagaatcgcttgaaccggggaggcagaggttgcggtgagctgaaatcatgcagctgcactccagcctgggtaacaagaatgaaactccatctcaaaaaaagaaaaaaaaaaaaaatccaaaaacatgatgggccgggccggtgacggcttccctggggcaagtcccgaaaacccatttctggcacagaggggaccctgcagaaaggacccatggctaacatcatgcaggggagtcacacttggcaacttttcatagacgaagccccctccagacccccacactccatcgtgcattcattgcaggatcgtgcagtttagcgacgggttcaaccatcacaatccgagtttagccgtatggagtaacaattttttaaataaagagatatttccaaaaaacttcatgatgtcacctcccgccccccatctcaattttacctctacttaaaaacaacacaaagcattccagtgaccctatgaagtctttttaccaatggccaattctcccggaactattgccaccgggcgaagtcacctccctttccccctcggcgccggtccacaattgaaacggcaatcgagagttttaaaaaattgttaccccatcgctgggggatttcagttattccgaacgggaagtggccgtaaagcctccatcccttttggcccaaactgagagggccatggggtcggacctgaaaattcatctccacctacaaggtccattctaccccatccgggcggtgggaacgccttttttggcggggagaggggggatttcttttggaattaaaggttttggggacttgagatgttttgtttgagctaattactgaatgatgccctgcctgagacagagacagagacagagagagagagagagaaagagagagagagagagagaacatatgagaacacagttataaaataatacaaggtttcttgtccttaaaggggttctccgaggcagggactccgaccagcagggggtcgttccgggcatgttgctcacagtagctcatgaggtcagacgccgctttggagacctgtgtttgagcacaaggaggagacagaggagacataagaagaggctggcacacccgggttcacagcagcaccattcccaagagccacaggcggaaacagctcaggagcccattgatgggggcgtgggcaaacagtgcggcccgtccacacgctggaatattactcagccatgaaaaggagtgaggctctgacataggccacaacgtggatgcatctcaagggcctcatgctcagtgagagatgccagacacagaaggccacacagtgtgtgatcccatttctttcttttttttttttgagacagagactctatttgtcgcccaggctctagtgcagtggcacgatctcggctcactgcaacctccacctcgcgggttcaagtgattctcctgcctcagcctcccgagtagctgggattaccttcatgcaccaccacacccagctaatttttgtatttttagtagagacagggtttcaccatgttgatcaggctggtctcgaactcctgacctcgcgatatgcctgcctcagcctcccacagtgctgggattacaggtgtgagccactgcgcccggccgtgtgatcccatttctatgaaatgtccaggacaggcctatccacagagacaggaaggggatgcgtgggtgccggtgctggggagtgatggctgatgggggacagggtttccttttggggtgatggaatgtcctggaataaacgtgattggatgcacagcattgtgactatattaaatatcactagtggtaaactttatatgtgtcttggccaggtgcggtggctcacacctgtaatcccaacatgttgggaggcggaggcgggaggatcacttgagcccaggagtttgagaccagcctaggcaacacagtgaggccctatctctacaaaaaatacaaaaatgagccaggcatagtgatgtgggcatctgtagtcccagctaactggggggctgaggctggaggattgcttgagcctgggaggttaaggctgcagtgagtcaagattacaccattgcactccagcctgggggatggagcaagaccctgtctcaattaagataaataaacaaataaataaatttatgtgtgtcttttcccaaaattaaaaaaagaaaaatgcagtggtgtgatcactgcaatctcttgctccccgggttcaagcaattctcctgcctcagcctcctgagtagctgggactacaggtgcctgccaccacgcccagctaatttttgtatttttagtagagacgggtttcagcatgttggccaggctggtctcaaactcctaacttcaagtgatccacctgccttagcctcccaaagtgctgggattacaggcgtgagccacggcacctggcctaaaaaatatttttttaaaaaagaaaaggctgagcttccttcagcaagcgttgccagattttgaacacaaagggtcagggacagatggaccccgttttcggagtccaagacctcattctcaccccaaggaaggaaggtcctgataggaaaacgctgcctgcacatttgatgagcttgagggaggtttcacggtgacacccggccagggggctgggcccggtgaggacgagataagcccgtctccatgtttctcttgcagcctgaaccccctgatgactccaaccctctgaggggctgatgcttccggtcacaggagggaccccctgccccgggctgctgccagcccgccccaggctacacgcccgtctctcctggccatgcctttgggggtgccgctgccactccccgcttagctcaccccagcagggctggggctggggtgtccggtgtcctgggtcaggctacacggggacacgtccatctggccctggatctcatcccgtaaccggtaactgtgtctctgtgggactcagcgacctttctctccttgctttctttcctggaaggcgagagggcgatcacagggggaggattagatgtggcagaggtgaggggatgatccgagaaggatcgcagtgtcgcttcacggaggtgcctttgttatctgtttttgagacagggtctcgctctgtcccccaggctggaatgcagtggtgctatcatagctcaatgcagcctccacctcctgggctcaagtgattctcccgcctcagctgggagtacctgagtagctgggactacgggagtgagccactacacctggccataattttcatttttattatttatttatttttttgagacagagtctcactctgtcagccaggctggagtgcagtggcgtgatctcggctcactgcaacctccgccccctgggtccaagcaattctcccacctcagcctcccaagtggctgggactccaggcgcacgccaccacgccagggtaatttttgtatttttagtagagacggggtttcaccatgttggccaggctggtctcaatctcctgacctcaggtggcccgcccacctcagcctgccaaagtgctgggattacaggcatgagccaccgtgcctggcctggccataatttttagaataattttctggtacagatgaggtctcactatgttgctcaggctggtctcgaactcctaggctcaggcgaccctcccgcctagacctctgaaagtgctggggttacaggcatgagccgcctcgcctggccagtacctctgcatcccagatcctctgtcctcctttggaccccaaggatacctgggacctgggcccttcaaacggccaggagcctgtgggacagctttggggtcttgcccagctgggcagccgggggacgctcatgcccacagagtgagcccgccggctgcggcctgtgatgactcggacctggcctgctttctagacttctatttgggaagcggccctcctggacgacagaaatagcctccagaccccgaaaatagctggcattgtggctccagcacgtggcaccttggcaccaccccccatgcccactgcgctgggctggtgagccccaagatcgtcgccgttgaggttctgtggttctggtcgccgcgttggagctggggatgtaaaacctcaggcgggactgggagtggggacgggtcaaatcctggctccccccgaggcccgacattcaaaggggcggtgggggcccctcctcaacatcaaacagggcaggatgagtcaccgccctccgcccgggctgggggctggcacccactcgtaaaaggaaaaccacttcaaccagggctttctctcttttcagcccgaaggaatgctttgaatgctcaggtctgtcctcagcagtcagattgctggaacattcagacacctcgtgggaggcagacccctcccctactggttggatcccggccagcagcagcgtgatggggtctgggagggctcagagctgcgctggagggagactcaccggccgatcagaaccacctgtgccacctggccagcagggacgactctgtccgcctccccgctgggagcaaagcaagggccggtcaccccttcctaataaattcccgtggccaataatgacaagctggtgacaggtgctggagagctgagttctgagtggatacgtggggtgatggctgattttatgggtgcactagggcgggccatggtgccccagggtttggttaaatgtttttttgtttttgttttttttctgagatggagtctcaccctgtcgcttggggttggagggcagtggcgcaatctcagctcactgcaacctctgcctctcgggttcaagctattctcctgactcagtctcccaagtagctgggactataggagcctgccaccacgcctggctaatttttttgtaattttagtagagatggggtttcaccatattggccaggctggtctcgaactcctgaccttgtgatccgcccacctcagcctcccaaagtgctgcgattccaggcgtgagtcaccgtgcctggccagttaaatgtttttttagatgttgctgtgaaggttgtttttttcttgtttcttttttttttttttttttttttgagatagagtctcgctctgttccccaggctggagtgcaatggtgcgatctcggctcactgcaacctccacctcccaggttcaagtgattctcctgcctcagcctcccaaatagctgggattacaggcatgcaccaccatacccgggtaatcttttttttgtatttttaggagagacggggtttcaccatgttggccaggctggtctcgaacccctgacctcaggtgatctgcccacctcagcttcccaaagtgctggaattataagtgtgagtcaccgcgctcagcctgttttttattttgtagagatggggtcttgctatgttgttgcccaggctggaattgaacgcctgacctcaagtgatcctcctgcctcggcctcccaatgtgctgggattacagctgtgagccactgtgcctcacatgcaaaattttttttttttttttgatgtgattcacatttaaatccgtagacttcaagcacagcaggtgaccgtctgtaatgcagatgggcctcatctaatcagttgaagggcttaagagaaaaagcctggggtccttccaggaggagggaactctgcctccaggtggccttggggttccagctgcagcaccaactcttccctgggtctccagcctgctggcctacactgcagatttcagagcttgccttaaaataaatctcgacaaggcgcagcctcaagtgtgatccttgtaaaaaacttcaaacgggccaggcatggtggctcacgcctggaatcccaggactttgggaggccgaggcaggcggatcacctgaagttaggagttcaagaccagcctgggcaacatggcgaaacgccgtctctactaaaaatacaaaaaattagccaggcatggtggtgcatgcctgtaatcccagctatttgggaggttgaggcagaagaattgcttgaacccgggaggcagaggttgcagtgagccgagatcgcgccactgcactccagcctgggtgacagagcaagactccgtctcaaacaaacaaaacaaacaaatccttcaaacaacacagaagtgaaaagtagatacgacatgcagtctcctcccgcctgggactgtgtctctcagtttaatttgcatctgtcattgccaaggagctggacagatcaatgcagatgaggacgacaaagcgctctgtcacgatgaccgtctccacggggccccagtgtgtttacaaagcacgttacattgctgcacgaaggcaggagataggtgttagatcagctgcctctttctgccgaggaaatggaggctcagagaggttaagggagggcctcaaggtcacacagcaagagacacagttggggtgcaagcctctgccctcctgccgagcctcctgttcatcatttgcggggcccccaagggtctctcccctcctcttcctgatgcccgctgggctcaccttgatgcgctcaatcccggcttctatgcgtagctgttccaccagcttccgggcctgggctatgttgttagtggctgacattgtctgccatcagctctgggccccgttgttcagagagctgtgggggaagcagaggggtgtgggtcaaagttcaggtcaggcctctgggtggcagcaggggcgcccggccttggctcaaccttcccgactctaggcacggccactttgcctctgggtggggaccaggggcctccgtgtacaaagagctggcactcgtttaactctcagcatagagcctggcacgcggtcagccgtcacaatcctctgtgggagtttgcagaacgagagaatgaaagggcgaaggcaggctgggcgtggtggctcacgcctgtaatcccagcactttgggaggctgaggcaggtggatcatgaggtcaggagatcgagaccatcctggctaacacggtgaaacctcatcgttactaaaaaaaaaaaaaaaaatacaaaaattagccaggcatggtggtgggtgcctatagtcccagctactctggaggctgaggcaggagaatgacgtgaacccgggaggtggagcttgcagtgagccgagatggtgcccctgcactccagcctggacgacagagcaagactccgtctcaaaaaaaaaaataaagaaaaaataaagaaagggcaaaggcaataggccaggccctctggagaagggaggacccacgcaggctcccgggtggcctgcctcagtccatggcaggggttcttgccctccaggggacactgggtgatatctggggacatctgtggctgtggggggtgctcctggcatggagtgggttgggtggaggccagggacattgctcagctccctgcagtgccccggacggccccacgccagggaaggatccgaacgcgatatccatagtacccaggggagaccctgggtcagggcagggatcacagcagaacccctggtgactgtccccctccgtgtttttttttttttttttttgagacagagtcttgctctgttgcccaggctggagtgcagtggtgtgatctcggctcactgcaacctctgcctcccgggttcaagcgattctcctgcctcagcctcccgagtagctgggattacaggcacgtgccaccacacccggctaatttttgtatttttagtacagacagcgtttcaccatgttggccaggctggtcttgaactcctgacctcaggtgatccaccctcctcggcctctcaaagtgctgggatgacaggtgtgagcccggcctctcctccgtgtccttcatattgaaccagtcaggagcccatgctgttgcttcttgaattctcctggaaaaacccaggacctcaacagggcagacgatcacaggacgcagagtctcttgggagtccgtggaatccccagatctcatctggggatgactctgccctccatggagcactgggtgatgtctgggacatttgtggctgtcatgacttgggggtgctcctggcagggagtgggtggaggccacggatgctgctcagcaccctgcagtgcccaggacggccccgctccagggaacgatccagccccacgtgtcagtagtgtccagcctagagaaacctgcttcgtaggacccagtgagggggttggtgctgatgggggtggcaggggcaggggccaggttcaagagtcctgggcagccgcagtcccagccgggcgtctgtgagcagttaattaagccgcaccctgtctctgtcataactcatggcatcgctgtctgttttgcagagccaggcagccgcagagaagtcaaggcagattccagagttctcaaaaaatgcctacttagtgataagaaggaaaggactggccgggcgcggtggctcacgcctgtaatcccagcactttgggaggccgaggcgggcgggtcacaaggtcaggagatcaagaccatcctggctaacacggtgaaaccccgtctcccgggcgtggtggcgggtgcctgtagtcccagctactcgggaggctgaggcaggagaatggggtgaacccggaaggcggagcttgcagtgagcagagatcacgccactgcactccagcctgggggacagagtgagactctgtctcaaaaaaaaaaaaaaaaaaaaaaaaaaaagaaggaaaggaccatccatgcataccacaccgcaggggaatctccagggcctgggatgtgtagcatgcttctgtttgtgtaatgtgtttaagaggactttttttagacagagtctcgctctgttgcccaggctggagtgcagtggcatgatctcagctcactgcaagctccgcttctccagctccagcgatactctcacttctgcctcctgagtagctgggattacaggtgcatgtgccaccatgcctggctaatctttgtatttttggtagagacatggttttaccatgttggccaggctggtctcaaactcctggcctcaagtgatctgcctgtctcgacctcccaaagtgctgggattacaggcatgagccaccatgcccggcccaaggacgaaattttagaaatggagaacagattagcggctgccagggatcagggaggggcaggggctgggagggagataggtctctgtataaaagggcaacacagccaggcatggtggctcttgcctgtaataccagcactttgggaggctgagatgcgaggatcacttgagtccaggagtttgaggccagcctaggcaacatagcaagaccccctctctacaaaaaattagaaaattagctgggcatgggtagcgcactcctgtggtcccagctacttgggaggctgaggtgggaggatcacttgagcctgggaggttgaggccagactgggcaatttagtgagaccccatctctgaataaataataaaagggcaacacgaatgatccctgttagtgcctcaactacggtgatgaatccacaagcctacatgagtgataaactcacagagagcctcacacactcacacaccagcgggcacaatactgaatactgtggaacctgagtgaggctggtgggtgtgtgactgtctggctgcgatcctgcccatagctttaccaaatgttaccaccagggacggccggggaatgacacacagaattcctctacattctttgttagcactggctgtgactccacggcgatctcaataaaaggggcaattaaacaaaaaatccctttgacaccgcccagcctccttggtttccagcagacgtcccacccccactttttgggggcagagaaggcccaatctgtctgctctggaggcagagcccacgtgtggccgctcagagggctctgattccagagagcttcaaagcagccacaaaacatccaactcagggaaaaccgcccttggttgggcttaaaaatacctaaattactcagtgctaaaaatacgtgcacgcagagaacaaacgggctggccgcacctcctgttttccttggaaggccagggggtcctatttagcatccacagtcaggagtgtccacccagaccctgggcccctgctgccctgggcagccaccgcccgcaatttccatgtgagcatcaggtcctgagccgtgctggcttttctgttttgggcgaaattccctgcgagatgctgcctttgggctgggtaataacccaggcctgccaggaaggccagagaggactgcgctgtgtgtgtgtgtctatgtttatttgcatgtatgtcaatgatgcacatgtgactgtacacgtgtgtacacgtggtgtgcatgtcagtgtgcacatgtgtatgtgtgtgcacatgtgcatgtatgtgtaccttgcgtgtgcatgtatgtgtgtatgtgtatactggcattcatgagtgtgcatatatgcgtgtgtgcacacatatctgcatgtgtatgtgtacctgcatatgcatgggtgtgcacgtcagcatgcatatgagtgtgcatccttgcatgtgtgtacatgtgcatgtgtctatatgagtgcatgtacacatctacgtgtgtgcgtctgcatatgagtgtgtgcataggtgcatttgcatacgtgcatgtgtgtggacatgcatgccagtgtgcacgtgtgtatgtgcacgtgtgtggacacggcactgcatgtgcgtgtgcgcacacgtgtgtgggcatgcatgtcactatgggtgtgtgcatgcgtgttggcgtgtgtgtacgtcactgtaggtgcgtggatatgtgcgtgcgtgggtgtgtacatgtgtctgcatgtgtacatgcgtgtgcgtgtgtgtgcgcacgggagtgcatgtggatgcttgggctgagatgccgagactcagacacagattgcatcacccatgcagtcgcctccctaagtccccgtctcggtggtgtcaccagccggcactgactcaggagcagccatgcccccagcagaggactaagccaacagcagcagaactggccacgcactgagtcagccaggaacgcccctcccaactgcctccctgcagaggcgcacgggtgccgggcaccccgacctgaatgagcttgcctcggggcccgtggcccggggaagctgtgggaggggcgggagcaggcagctccgggggcagggccaggtggtcaaaggtgcacacagtccccacggctccctcctgacggtcgggctctgcctcggtgcacaggctcctgcaggcaggcaaggctccaggccaggctctccaaaaataaaactgaagagggacgccgcccggccccgcgctggcctcctagcaaaaggctcatagccacacccgagtctaagcccgcctcgtgcagaaaaatcccactcgcgcctgaaagtcaagaaggatgagggtacccccccactccaggacatagtggaaatctgtggtcgctcagggaagggtgaccagccccgaaacagagcagacctgagctgatcagacacgaggctccagtgcacagaagggctgaacaaaaccgcaggacaggagctggcagcaccggcagggagggaggtgggaccacagggacccccagggagcagccgccctctaaccccttgctccggcagttatcccgagggcaaaaaatgaaaagaaataaaaatctacatatagaaaggcgtttataattgcgttatgtgtaagagtgaaaagttagaatgaaagcaagtgctctgcctcttttttttttgagtcggagtctcgctctgtcgcccaggctgaagtgcggtggcgcgatctcagctcactgcaacctccgccttccgggttcaagcgattctcttgcctcagcctcccgagtggctgggattacaggtgcctgcctccacgccaatttttttttttttttttgagacagagtctggctctgtctccgaggctggagtgcagtggcgcgatcttggctcactgcaacctcctcctccagggttcacgccattctcctgcttcagcttcccaagtagctgagactacaggcgcccgccaccacgcctggctaattttttatatttttagtagatacggggtttcaccgtgttagccaggatggtctcgatctcctgatcttgtgatccgcctgcctcggcctcccagagtgctgggattaaaggcgtgagccactgcgcctggccaatttttgtatttttaatagagacggggtttccccatgttggccaggctggtctcaaacgcctgacctcaggtgatccacccgcctcgacctcccaaagtgctgggattacaggcgtgagccaccgcgcctggtctactattagtttataatataaacttatactatattatactatagtattatacatttattacatatttatatattttattatatatttgtttactcatatatttatatttatactcatatttatatttatgtcatttatcatgcatttattacatatttgaagattcattcactatatattcatatcagttttgtattactaatatatagttttagtatttagtatgtattatacacttattgcatacatattttatatttattcatcatttacataatttatacattattaattatatagtttgatttctattttgacatttacattgtttgctattgattttatatttgtatttataatatatttagattactattttatatctgtatatatgtattatatagttatagaatctgttataggtttattgaatattgtttatcttaactttttttttttgagagggagtctcgctctgtcgcccaggctggagtgcagtggcacaatctcggctcactgcaacctccacctcctgagttcatgccattctcctgcctcagcctcccgagtagctgggactacaggcgcgcgccaccacaccgggctaatttttgtatttttagtagagacggggtttcaccatgttggtcaggctggtctcaaactcctgacctagtgatccacccgcctcagcctcccaaagtgctgggattacaggcgtgagccactgctcccggccctatcttaactttttattttgaaacaattatggactcaggcagttgcaaacatagtccagggagccccacgcaccctctcccggtcccctccagggcgacgtcacctgtgactatgagacactatcagaaccgggaccctgaggtcagcccaatgctgtgtctcactcagacggcaccactcccaccggccctcatctgggggtgcagagggagttttggtgtcgcgcatccctccaggaagggggcctgggttcctgcctggaggcatcgcccctctggagctgtgcccccgccctcgaacctgtccccactgggaggaggagaggaggtgaggaggtgtggcctaaacgtttgctgagcagatggctgagcagacaaagacccaaaactgcgacaaaattgacagtggtgtcagtaaagagagacacagcctagggccccagtctgcaaaatgggctgaactccgaagttcctaaaatcctaaagagacctgatctacaccgggaagtttaactcactccagtacaggccctctccctctggctggatccttttctggggtggggctgtcctgggcactgcagggtgctgggcagcatccctggtctccacccactccttgccaggaaacccccccccccaccagtgcgcccacagtcatgaccagcacaaatgtccccagacttggacaggtgtcccctgggggaaaattttaggcctttatggaactcccttatcaggagaaatcctgcagctcagagtggttcccttaggcaaaacgcaaagagtttgaacccagctgactgaaggccccaaaaataaatggtactgaatgaaaatatgctaggcgtggtggctcatgcctgtaatcccagaactttgggaggttgaggcgggtgggtcatttgaggtcaggagttcaagaccagcctggccaacatggtgaaacccccacgtctgctaaaaatacaaaaaaatgagccaggcatggtagtgcgtgcctgtaattctagctactcaggaggctgaggcacaagaatcgcttgaacccaggaggtggaggttgcagtgagccaagatcgcgccactgcactccggcctgggtgacagagtgagaccctgtctaaaaaaaaaaaaaaaaaaaaaggcctggctcagtggctcacgcctgtaatcccagcactttgggaggccgaggcgggcagatcacgaggccaggagatacagaccatcctggctaacacggtgaaaccctgtctctactaaaaaaaaaaaaaaatacaaaaaaattagccgggcatggcggcgggcacctgtagtcccagctactcaggaggctgaggcaggagaatggtctcaaaaaaaaaaaaaaaagtaaatacaggggtgtttccaaaagggctttaattttattagcatcccagaatgctttgtgactaggagaggccccacagggcgggagtcttcccccagatgtgagccccgttgcatttgaagggagtgagaccacagctcccacagaggagggaactcgggaaggtggtaggccagaaatctgcccttgctctaccaagctgtgtggccttgggaaagtttccttccctctctgagccccagtgacctctgttggaattctcagagggacactctcatctctgcaccaggcctggcccccaggttcctgtgtgaggaaacaggggttccagagtctggcaggcaggaagaggaccctcttccagggacctgtggcaactgccaaatataaacacagctgctggaaagacaaggtggctggaacatcctgcacccagcgaatgtggaagggccggtttgcccggagctcttgagaaatctcactccccgtggacttgcaccctgtcgccactcccctgacctgccctgaggctggggtgcagcagggaattgcaacagccccccaccgccggccctggagagacctgggcagagctggaagctgatcagattaaaaatcagcatggatcggattcgggatagagccacaaactgggtgtcctgaaattacccatttttgtgttggtgggtttttttgtttgtttgtttgttttttggagatgatggctcactctgtcgcccaggctggagtgcagtggcaccaactcggctcactgcaacctccgcctcccaggttcaagcgattctcttgcctcagcctcccggagtagctgggattacaagcatgcgccaccacgcccggctaatttttgtatttttagtggagacagggttttgccatgttggccaggctggtctcgaactcctgacctcaggtgatccacctgcctgggcctcccaaagtgctgggatgacaggcgtgagccaccacgcccggcccatttttgtgttgttgaacttaaagcatgagcttgggcaaatcccttcttcttctgagccatagggtaaaggtgagaggagagtcttgtaagctccgtgatgagttccagaagtccagggtgaccagtcatgcttagatcatttccgtgtcatttatggactcgatgagagacaaaagggcctctggggactgtgagttgcatcagcctcttgctgaactgacagaacattcaggtttcagggagaggtgaggtcattgccagggatcttgttcaagggataagggctgacacctgctcctgaagagggaccacacggtgcctgcctggaaatggaaaatccgggctcgcactctggctctgctcctggtttttgggtcttggcttcctcagctggaagatgagagggctcctctcaaggctgaggatgggtccccatttgtcatcctgtggctccaagatcaagaggatctagaatatccatgacctccttctaaacgacttggactttgggttaaaaatctctcttggcagattttggcttgcacaatggtggattagcagctaaggacaaacccactctcttgctgaggtccactagaaaagctggacagggccgggtgcggcggctcacgcctgtgatcccagcactgtgggaggtcgaggcgggaggatcacttgaggtcgggagtttgagaccagcctggccaacatggtgaaaccccatctctgctaaaaatacaaaaattagctgggcatggtggcacgtgcctgtagtcccagctacttgggaggctgaggcacaagaatcacttaaacccgggaggcagtggttgcagtgagctgagattgtgccactgcactccagcctgggcgacagagagagaccctgtctcaaaaaaaagaaaaaaaagctggacagggctgggtgcggtggctcaagcctgtaatcccagcactttgggaggctgaggtgggaggatcacttgaagtcgggagtttgagaccagcctggccaacatggtgaaaccccgtctctattaaaatacaaaaattagctggacgtggtggcgggtgcctgtagtcccagctactcaggaggctgaggtacaacaatcacttaaacccgggaggcagaggttgcagtgagctgacgttgtgccactgcactccagcctgggtgacagagtgagaccctgtctcaaaaaagaaagaaaagctggacagaatgtcaaagcatctgctcaagggcctgcagggttattaagataatggagaatttccagccaggatttaggggaggatcgaaagagagcctgggtttggggtcactttttcctggggttgggagggtttgctgagaggccgagtgatatttctatcagcttcacgaggccaagggtacagaaattgaggtccagggtttcctgaggagagaaggcttggtaaattcccccttggtgtgaattgggacaacttaatattgcactgtaagagtaacggtcacagctgggcacagtggctcacgcctggaatcccagcactttgggagaccgaggcaggtggatgacctgaggtcgggagttcaagactagcctggtcaacatggtgaaaccccgtctctactaaaatacaaaaattagctgggcatgatggcgggttcttgtaatcccagctagtcaggagctgagatgagagaatcccttgaatccgggagacggtggttgcagtgaaccgagatcgtgccactgtattccagctttggcagctgagtgagattccgtctcaaaaaaaaaaaaaaaaaaaaaaaaaggagtaaagatcaagaggaagcagacaggtccttctagcaactacagcagagttttgaataatctcaatccctaatattggattaaggtgatgcgagattgctggtggccccaaatgcctggaagaagtaaacataaatcccctctggaggaaaataatacgatcccaggcctcagattatttctacatgcaaatccgcaatacaggccgggcgcggtggctcacgaggtcaggagatcaagaccatcctggctaacatggtgaaaccccgtctctactaaaaatacaaaaaattagccaggcttggtggcaggcacctgtagtcccagctactccggaggctgaggcaggagagtggcatgaacccgggaggtggagcttgcagtgaaccgagatcgtgccactgcactccagcctgggtaacagagcgagactccgtcccaaaaaaaaaaaaaaatgcacaatacaatatctggcatgcaagtaagacatacgaggagccaggaccacataaacaaaaatcagcagaaataaccagcactgccaggtgcggtggctcacgcctgtaatcccagcactttgggaggcctaggcaggcggatcatgaggtcaggagatcaagaccatcctggctgacacggtgaaaccccgtctctactaaaaacacaaaaaattagccgggcgccatggcaggcgcctctagtcccagctacttgggaggctgaagcaggagaatggcatgaacccgggaggcggagcttgcagtgagctgagatcacgccactgcactgcagcctgggcaaaagaacgagactccgtctcaaaaaaaaaaacaaaaaaaaaaacaaaaaccagcactacaaagagacccacagggtttccatatactgggaattgacagagactttaaattaattgtgttaattacgttcaaagagataaaaagatgagattggaattttcgctgcaaattggaacaatggggaaaaaaaggaaccagtggatatggagaaaatgacaatatctgaaaagtaagaattcaatggaagaaataaaaattagtgaactggaagacagaacagagaaaaatatccagaatgaagcaagacgacacaaagggaaagaaactacagaagaaagagcaaaagacatagaagatgcagtgacgtctaatatacgtgttattggaacaccagaaggaggagagagagaatgaagcaggaacaatctttgaagagataatgaccaataactttctaaaactgataaaaagacctcaagccacagatttcagaatccctagaacctcaggcaaaagaaatgtcctaaaaagtggcagagaaatggccaataagcacatgaaatggtgtctaatgattagtcatgaaggaaatatgaattaaagtcatcaagagagactgcctctcaaccactagagtggcaaaaatttaaaagactgacaacactaaatatttgggaggatgtagaagaactggaggcatcatccattactgacaggaatgtgaaatagtacaaccaccatggaaaatggcttagcagtttcttataaggctgaacacatacctcacctatgacccagcaattccactcctagggatttattcaagataaataaaaacatgtctccataaaaggacttgtacgagatgttcataagcttttactcataacagcaaaacctggaaacaacccaaatgcctgtcaacgagagaataaacaagccatggcatttcacacaatgaaatacggctgcacacaaaaaaagaataaactattgagagatcaagcaacgtgtatgattctcaaaaatataaatgtattctaaaaaaataaaagataatacattattcaatattaaatattagtatttaattaatattaatatattaaatattaatattaaatatttaaaaaataaatgcctctcaaaaataaaaaaagtaaagcaacagaagctggatattagaggtgcatattatataattccatttatataaagttcaagaataggcaaaactatggtgatagaaatgaaaacagaggttgctgcctctggccagggtgttggctagaaagggccatgaaataacttctagggtgatggcgatgttctctatgttggttgagctgttggtgtacacaggtgtacacatttgctaaaatccatcaaactgtatctttaagatctgttcatcttactgcatttgaattggactttgataaaatcagttaattacaaacaaaaatcaacaaacaaaagttgccagaggaaaaaacagcagcaattaggtggacccagtgaaaatatccttcaagaattagggggaaataagggcattttcagataaacaaaaccagactttctcaccaacagacttgccttttaaaaggtaaaactagagaaagataattccagatgaaaggtagaaaatgcaggaagaagtgaaaaacaacaaaaatgttgtagagaggaaagagcttgataagataattctaaaattccagtggaaagatcaacaggaagtgaaaaactctgcaaaagccttagaacaaacacacatgaatcatatcagccttcagctcagtcctcacctccaaccaacccacaacagaagatgttctatgcttctgccttcacatttttattatacgatttttattatataattttggtcacgggattccagtgataggagttataaatattatttcaggagtttactagtgacattaattgaattttgcaattctacacacacacaaaatgaagtcagcatctgaaaaaatatatatacatcctcatccgctgtgactggtccaatgtcagtgtgataagactcaatgccagctgtccccagagacttttcttcagtccagccagcccctccttggatgtccacttcagcagtgctctgcagcctcaggcagatccccgtgtactccaccagtggcctccgctccactccccactccctccatctcctaacagctagagtgcgcttctgaaaatgcagttgaatctgttcctcccctactcagaaaccaccagcagcttccaattccttacaaaatcaagtgcaaaaatcaaggcttattgttcaattcccactgctaggaattcttcccccagctccaatcccatcaaagaactgccttctctgatgcatggctccaggatcatctcctttctcaccctgtggcctcatgagctcagcattttccagattcggaaatcctggagggggccatgagggagatggctgtccctgggaaactaagacccagagaaggtagatggcttgcccagaagatatttattataagaaattggctcacataattatggaggctgagaagccataagatgtacaattggcaagctagagagacacgagaactgatagtttctgtctgaaagccagcaggcttgagacccaagagcagatgtttccactggagtccaaaggctggaaaaacctatctgtcagcttgaaggctgccaggcaggaggaattatctcttacttagcatttttgttctattgagggctttaactgattagatgaggcccccacattggggagggggaggaatatgctttacacagcctatggttcatttcatccagaaacattctcacagacacacagaataacatttaaacagatatctgtgcaccccatggaccagtcaagttaacacataaaattaacagttacaacaatcttggagccagtcattcagcccaccacatcattctctcatggccctctgtttcttttcttgtagtatttataatttgatatttgagttgtatgcctactggactgtcagcctcatgaggccaaagatctgggggctgggtgcagtggctcatgctggtagtcccagcactttgggaggctgaggcaggaggatcacttgagcccaagagttcgagaccagcctgggcaacatggcaaaaccttgactctacaaaaaaaaaaaaaaaatacaaaaaactagttgggtgtggtggtgcacacctgtagtcccagctactcaggaggctgaggtgggagaatcgcttgagcccaggaagtggaggttgcagtgagccgagatcatgccactgcactccagcctgggtgacagagtaagaccttgtctcaaaaaaaaaaaaaaagatctgaattgttgtccccagaacctggtatataaatgttcaagagacatttgcttggggcctgaagcgggggctatgcctgtctttgcagatgtcgaccttaaccctggaagatctctttcccctgtgacatattccttctttatgatgcgggcttcaaatgttatttctttttggaacacatgttttttaatggcttctagcaccaggtgaccttgactcggaattcctagaacacggtacactcggaaagtcatatgggctgtttgttgcagactaaatatttgtgtcctcctctgaccccatcaagttcatatgttgaaatcctgggccaggtgtggtggctcatgcttggaattccagtgctttgggaggccaaggtgggagggtcacttgagcccaggagtttgaaaccagcccgagcaacagagtgaaaccccacctgtacaaaaataagaaaattaactgggtgtggtggtgtgtgcctatagtctcagctacttggatggctgaggcaggaggatcgcttgagtccaggagttggaggctgcggtgagttgtgaccacaccactgtacttcagccgggcaacagagtgagacatatctcaaaaagaaaagaaggccgggcgcggtggctcccacccgtaatcccagcactttgggaggccgaggtgggcggatcacgaggtcaggagtttgagaccagcctggccaacatgatgaaatcccgtctctactaaaaatacaaaaacagtagctgggtgtggtggcgggcgcctgtagtcccagctactcaggaggctgaggcaggagaattgcttgaacctgggaggcggcggttgcagtgagccgagattgcaccattgcactccagcctgggcaacaggagcgaaactccatctcaaaaaaaaaaagaaaagaaaagaaaagaaaagggcctcagcttgctgtttttgaaactgaagccacatgttttcttcctaatcagaactaaagtgaaagattaaaacaatcgatgttttgtttgtcttggagcaagaaatataagatctgtgtttctggcttgcagacaagagcactgccgcactgaagcgtgtgtgggtcgtatatgtgacagagcacaggaggcctgcagcgaggtcccgacagggaggactttcttgggccggagacctggttctgagcacgtcccctggacttccctgagcctcagctttctcggctgtaaagttcagaactagacagcggtttcccctgtgctccacgacaccctaggggttctgtgcagaggctgggccaccctgggttctcgggaggggctctcttggccttggggtacagtctgtgcttcctggtcggactccatttgtgtatgtgtatattttattatacagataataaaatatatatacatacatatttttatttttatttttattttttttttttgagacggagtctcgctctgtcgcccaggctggagtgcagtggtgtgatctctgctcactgcaagctccgcctcccgggttcacgccattctcctgcctcagcctcccgagtagctgggactacaggtgcccgccaccgcgcccggctaattttttgtattttgtttagtagagacggggtttcaccgtgttagccaggatggtctccatctcctgacctcgtgatccgcccgcctcggcctcccaaagtgctgggattacaagcatgagccaccgcgcccggccacatacatatttttagagccaggttctcactctgttgtccaggctggagtgcagtggtgcaatcatagctcactgcagcctccaactcccgggctcaagcgatcctcctgcctgggcctcctgagtagctgggactacaggtgcatgccactaggcctggctagttttttattttttgtagagatgaagtctctacagctatgttgcccaggctggtctcaagcgatcctcctgcctcagcctcccaaatcactggggctgcaagcgtgagccatggcacctggctataataaaataaatctgatatagaatatagaatagggtcataatatataaatgtaatcaacatataatacactgagcatgctcaaagtgtacggttctgatgggacaggaagctggaggcgggaaactggccctggagtgggggttgtggtgaagctggaggcgggaaactggccctggagtgggggttgtggtgttaggctgggacccggttacagtgactgcagggctgacaagaaattatgaaaggtcttgagggaagcgacacagaatttcaaaagaacataatgaatgcactttgggaggccgaggcaggcagatcacttgcggtcaggagttccagaccagcctggccaacacggtgaaaccccatctctaccaaaaaatacaaacatcagccggatgtggtggtgcatgcctgtagtcccagctactcaggaggctgaggtgggagaattgcttgaacctggaaggcggaggctgtagtgagctatgattgcgccactgccctccagcctggacaacagagcaagactctctctcaaacaaaacaaaacaaaacaaaacaaaacaacaatgaatggagaggagaaaagctgcagtggctacggaggccctgatgccatggatggtaaactggtatcttctgacgatgatgactttattgtaaaaagagaacatacacgagcatcaggaataaggaaagccgtgctgagtggcccaggtcagtctgctgagaatgaaaccgaccaggtcaattttagagagatccctccacgatgctatccaaagcatgcgtcaggccatcagcagtggtggtgactcatgcctgtgatcctaccactttgggaggccaaggctggaggatcatttgaggccaggagtttgagaccagcctgggcaacatagtgagacccccgtctctgcaaaaaaaaaaaaaaaaaaaaattagcctggcatggtggtgcacacctgtagttccagctacccgggaggctgaggcaggaagactgcttgagcccaggagttggaagctgaagtgagctatgattgcaccgctgcactccagcctgggcaacagagcaagaccctgtctttaaaaaaacacaatagaaaggcatgcatatattttacttacaaggttcactactctaacagctccactgagattcctgaattcctcactgcattggaagtgctgatggcttcagacttcctagatatatatatttttcttttttttctttttttttgagacggagtctcactctgtctcccaggctggagtgcagtggcgcaatctcagctcactgcaaactctgcgtcctgggttcaagccattctcctgcctcaacctcccgagtagctgggattacaggcgcccgccaccatgcccggctaatttttttttgtatttttagtagagacagggtttcaccgtgttagccaggatggtctcgatctcctgacctcatgatctgcccacctcggcctcccaaagtgctgggattacaggcgtgagccacggcacccagccctagattgttaaataaattataataaactgttaactaatttaggtatttaatacttgtagtttagttagtaatttttcatatattgcatgttcctgtaaacaaatgaactataaactgcgttgcaaagcagattatcttctgttttttccttgcatagtaatcagaattgaaatttgtttgtgacgacaataaattaaggatattttcacaaactgagaaataaacatatataccaactttttttttttttttggatggtgtttccctcttgtcacccaggctggagtacaaaggcgtgatctcggctcactgcaacctttgcttcctgattcaagcgattctcctgcctcagcctcccgagcagctgggattacaggtgtccgccaccacgcctggctaatttttgtatttttagtagagacggggtttcaccatgttggccaggctggtctcgaactcctgaactcaggtgatctgcccgcctcggcctcccaaagcgctgggattacaggcgggagacactgcgcccggccataagctcaattttagacacatacgatatccaatgggggatggacacacacctgacacggtcccagtggagccctgaatggacctctgtgctggaggctgggtgtcgtccctcccccagctgccctgtctcattggccaaagggtttagggagaacaacctagaggccttgctcatccagtggcctaaagttctgcattctaaatacacaccatcgcaggaactcacacctctcctttctccttcctgcctccctcccttcttctttctctctccctctccttccttccttcctccttccctccctccctctttctctttctttcttctctctccctctccttcctgccttccttccttcctccctccctccttctctctctctttccttccttttttctttcttctttctttctctttctctctggctctccctccctccctccctcccttccttccctcctccctccctctctctctctctctgtttctttctcaatttctttcttttcttttctccttccttccttccgtctctctctctctttctttctttttcttctctgagaaggggtcttactctgttgcccaggctagagtacagtagtgtgatcccacctcactgaaaacttgaactcctgggcctaagccgttctcctgccccagcctcccaagtagctgggaccacaggcacacaccaccatgcccccctaattttttaattttttgtagagatgggggtctcactatgttgtccaggctggttttgatctcctggcctccggtgatcctcctgcctcagcctcccaaagtgctgggattacagacggagcctccacactcggcctgtgctctaagactgattcttgccgggacccttagcccgacggcgtgcccagcctgtgcagagggtgggtgcgtgggcccctgctcgggggtgggtgggctgaatccaggtgtcctgggctgtaaagccaagaagcagacagcaggcctggggtggttggagattttgcggggaccctgggggcgctgaggctggagcatcccgagaagtccaaacctgcctggcctgtctctgccgagcagacagcgaggcccgccgggcagcgggacagactggcttccctcctcccggggagacctgccggagcaaacccagctccttttttaggtctgtgatgccacggccactcttggaggtgttttccagctgcacaggaagccgtgacagcgagacccagagaggctggcggtggctctgaattccaagcatagttctcatagttgggaaagtgccactcccggctcgataaaccgaccaggagccgccgccgccagggccatcttctcaccagcagggagagagcatgcagccggtggaggcttctgagagctggccggggcggcctgcgtaaaaggacaggaatgtcaagaatgcacccggcctggcagagacagggactttaccgagcggctcctgggcctggcggccagagaggcgagggagcgggagctaccgagggttcctccatcggcagggaaggtcctgagtcccccagaccctgttaaaagaggctgatcaggttgggtgcggtggctcgtgcctgtaatcccagcactttgggaggctgagtcaggagaattgcttgaggccaggagttcaaagccagcctggggcaacacagtgagaccctgtctctaaaataaaaaaataaaaataaatgttcttggggaagcgaagccgaatttcaggagaacataatgagggtgcagtgagctgggatggcaccactgcactccagcctgggcaatacagcgagaccctgcctctaagtaaaaaaatcaaggccgggggcagtggctcacgcctgtaatcccagcaggttgggaggccgaggtgggtggatcacgaggtcaggagttcgagaccagcctggccaagatggtgaaaccccgtctctactaaaaatacaaaaaacaaaaaaattagcctggcatggtggtgggcacctgtaatcccagctactcaggaggctgaggcaggagaatcgcttgaacctgggaggcggaggttgcagtgagccgagatcacgccactgcactctagcctgggcgacacagcaagactccatcaaaaaaaaaaaaaaaaattaaaaggtaagctgggtgtggtcgcacaagcctgtagtctcagctactccgggaggctgaggcgggaggatggcttgaggccaggagtttgaggttgcagtgagctagggtttcaccattgcactccagactgggggacaaagtgagactctgtctcaagaaaataaaaataaaataagaaaggctgatcagggccgagggctgagatgggaagaaatggtgcttctgtacccagtgctgctgggcctcctgtctggggctggctgcagggcggcccttccaaagagctccctgtggcaggtgcacagtcgggccttggctaggctcatgggaggcagcgctgtgtgttctttttttttttttttttttttttttgagatggagtcttgctctgtcacccaggctggagtgcaatggcgtgatctcggctcaccgcaacctccgcctcccaggttcaagtgattctcctgcctcagcctcccgagtaactgcgattacaggcgctcacaaccacatccagctaacttttgtattttttagtcgagacggggtttcaccatgttgcccaggctggtcttgaactcctggcctcaagcaatccacccaccgcggcctcccaaagtgctgggattacaggtgcgagtcaccgcgcctggcctggggtgggttttttcatttgtgcactgaatgtttattactgacagccagcaaggaaagggggactgcgccctacgactgcaaggaagtgaattcaggaagaacctgaatgagctggggacgacaactggaagcttcgcgtcagacagcaggcggctcacgtttcagtttcagcctgggagaccctgggcagaggacgtcattgcaccatgacctccagaactgtaagctcaggcaggcgtgttgctctaagccaccacatatgcagtagtttcttatgcagtgtaaggagctgatacgcaaggccaggatgggactggttggggtctccaggctggagggccccccggtgagcaggcatggggtcccacagcccaggacagcttcagctcttatttgccatctgctgctgctaggtgttagacgctggactgagcatgctgcacacatcatctctgctgttttccttttttttttttttttttggtggtttttgttttgttttgttttgtttttgaggcagagtctcgctctgtcacccaggctggagtgcaatgacgccatctcggctccctgcaacctccgcctcccaggttcaagtgattctcctgcctcagtctcccgagtagctgggattacaggcatccaccaccacaccaggcttattttttatttttatttttttgtagagacagggtttcaccatgttggccaggctggtctcaaactcctgatctcaagtgatccacctgccttggcctcccaaagtcctgggattccatgtatgagacgccgtgcctggcctcctttttttttttttttttgacacagggtcttgctctgtcacccaggctggagtgcagtggtgcaatcacagctcactgcagccttgacctcctggcctccagagatcctcccacctcagccttctgagtagctgggactacaggtgtgcaccaccatgcccggctaatttttaatattttttcttttagagctggggcctcaccgtattgctcaggccagtctcaaactcctgggctcaagcaatccctctgcttcggcctcccaaagtgctaggatcccgggcatgaacccccgctcccggcctgcaatttttcttttcacagccctgagatgagggtgcagcattaaaacccgtgcagagggtggctgcttctccatgagccgagcaaaccgtcctcccatggctgcttcctgtaaaccggctcctaaggccagcgggcgtttgctctcctgacggcacaggaagtcaggctcagcgaattccagctcagagcgggctctggcggcttccaggcagctccacaatgaggcggctgcgcttttccagtctgctcatcaaagcagagccagccttgtgtggcgcggcgtgccggggtgagtcagccccgggggaaggtggccttgaaggcgggaggggcggccggcctgcagcagcaacgtgagaacagaagcaaccttcatctggctctaaaacttccagaaccagtagctttatagctcgcagagctcctggactctttcctcctgggggtctggcaatcccccacctctcacccctccaaacctctgcctgcctcgaaaaaggaaagaaaaataaaccccaagcaacaaaaccagcaaccagatttggcaggaggggagacaatgcttggagtggaaacgtcagcccttccccgtggagggatgactgcttctgagaacacagtgttcagagacaagagagacagggtgttatgtttagagaggaaaagatccaaacccaaacaaaatggaacagtagtttgggagagaagagaaggctccgaggcactgtgaggaacaagtcgccttcgtacagtggctggggcagctgggtttgcagagagctgtgtccctgggcacctgcgtcaatgtgcacatctgcacgcctgctgtgggcacgagggcctcagccatgagcacccccgggagccatgaggacctcagtgcatctcacagaagcccctgaggacagtgtgcagtggcgcgatctcggctcactgcaacctccgcctcccgggttcaggagattctcctgcctcagcctcctgagtagctggggttataggcgccccccacccccaccacgcccagctaatttttgcatttttagtagagatggggtttcaccatgttggccaggttggtctcaaactcctgacctcaggtgatctgcccaccttggcctctcaaagtgctgggattttaggcatgagccaccgtgctgggccaacagtggctcttaattgggggggtgggtgattcagccccgccaggaaaccctgggcgatgcctgagacatctgtggttgtcggggttgggggagctcctggcatggagtgggtggaggccaggggcgctgctcagcaaccgtaagtgcccagcacagcctcaccccagagaaggatcttaccccactgtccacagtgctgagggagaagaccctgagttaattatttggggaaaatggggttcaatccctacccacactagaataagctcccaacgggatggatggtgtgaaccagggggacccccaactcctgggattcacctcctctctccctcccagctcggtgtggatttcattgtgtgcagcctcctgggacctcagcacagcagaggatcatgggacgcagagtctcttgggggtccgtggaatcccctatccctgggggtttcacctagaggtaattccgtcccccaggggaccctgggcgctgtctggcgacatctgtggttgtcgtaactggggggtgctcctggcatggagtgggtggaggccagggatactgctcagcaccctgcagtgcccaggacaggcccacctcagagaacaatctggccgccatgtctacagtgcctaggggaccctggtttagactctgcagaaaggtgcacacataggccgggcacggtggcttatgcctgtatttccagcactttgggagaccgaggcgggcggatcacttgacgtcaggggttcgagaccagcctggtcaacatagtgaaaccccatctctactaaaaaaaaaatcaaaattagctgggcatggtagcgcatgcctgtaatcccagctactcaggaggctgaggcaggagaattgcctgaacctgggaggcagaggttgcagtgagccaagattgcgccactatactccagcctaagcaacaagagcgaaactgtcttaaaaaaaaaaaaaaaaaaaaaaggccaggtgcagtggctcatgcctgtaataccagcactttgggaggctgaggtgggtggatcacctgagatcaggagtttgagaccagcctggccaacacggtgaaaccccctctctactaaaaatacaaaaaaattagccgtgagtggtggtgggcacctgtaatgccactactcaggagtctgaggcaggagaattgcttgaacccgggaggtaaaggttgcggtgagccaaaatcgcgccactgcactccagcctgggcaacggagcgagactctgcctcaaaaacaaaacaaaacaaaacaaaacaaacaaacgaaaaagaaaggtgcacacagcttccagagcggacacagggcatcagggtgagaaggcacagggcaacgatcaggcgttgatgtgtcccctggcagctgggatgcaggccccccacggcctgccatgttctcaccaggacgccaaagaggggacccacgcagagcccggggagcccgactgaaatggaaacttcaatacaagagacaggtctgagactggccacacctgctgcccgctccacagaaccccagggccccctcagcaaccagggtctgcatgcagagaccctgcacccagcgtgggcacccaccctgcacctgcagcctctccagggccaggtcgcccagcagggcctgggagggcggctgtgtgtggggccttccgtgccagctctgaccgttggtggctctgtgacctcaaggcagggccgtggggcccagggctgcgggcgggagggcctctgccacatggaagggagggccgcactggctggaaaatagtgccttgtgactgtccctgtcagtgtgggccctttgctctcaggctaaatcggtccccggggcagctatatttagaaggggctaaagagagggaatgaatgaggtgcccacgagaaagtgaaaaatagaccagcggggcaggtcccgccgctgccttcagccggagcttggagcctaagaatgagccggcttgttcagacaaagaggccgcgacgacagagggtgacgcgccgccagtgtgggtttggtcgccgcggtgacgggagcaggagaaaagaaaagctgctctctgtccacccggcggtggggtcggcgggggcgggggatgaccacggtcatgtgagagtttgcaagcccgggaaccggggccgggccaggacactgaaccccgtggctcctgtcactccagttctgggcttcccggctgaggaaatgctgtcaccctggccccgggccagggcaaggggcagcgccggcctcgtgacggtggtgctcgggagctgaagggcaggagggttaggaagagaacagagggcagtaccgggccttcccacctcagcacaggtgggtctttctccacgcatgccccccccccagaaaactcctacacatcctgcaaagccccaccgatgtcatcccctctgagaagcccctgattgcaaccatctatgcacagccaggctgcactaaaaccccttctccgcacactggcagctccctggacgttcgttgtgtcctgtgacattgtggctgctgcacacgacccatgtttctcatctcacagctctgggctcagagtccaacatgggcctcactggtttaaaatcaaggcacaggcagggctggtccctcctggaggctccaggggagaatctctttcccgcctttcgcctagaggtgcccgtatccctcggctcgggacccttcctcccccttcacagacacagcacagcctcttcagtctctctctgactctcaccctcctgcctcctctcgtgaggatcctgtgaggtcactgcgcccccccaccccggatcatccacggtggtgctctcatgactcaggtggtccttcactcaatcccacctgcagagtccctttttccatgtgtggtgacacagccacagctcccagggattaggacatggatgtctttgaggcctttgttctgccaaccccagcacatcccagacactgggtaccaaagatgccacttggatggaaggggctggaggccatggtgcagggagttcacaaagggtgttacttcctggaacccactctgttcccagggccgatctccttcccaggacagaggctcccaggcccaggcagccctcggatgtgaagtgcctgccccacctccatccatagcaggtgctgctgctgtgcatgggcacacgtggcctggtaggcccacccctctgggctctgcagcaggggccggcccgtccgggcacacacatggccaaggatggacctcgagcctggggttctctgctgtggcccgtgggctccaggtcacatcatcagaatggctagaggtcaccagtatcatgtgtgacatctccagggccaccccactccagccctggtgttgttagaaagtcccggaaaactacaggcccagggagcttctccctgagggctagggatcattacggatgttttcatgttaacaatggaaaacaaaaatcaaaaaacaaaaaccaggtatggtggctcacgcctgtaatcccagcactttgggaggccgaggagggcggattgcctgagctcaggagttcgagaccagcctgggcaacgtggtgaaacctggtctctactaaaatacaaaagaaatttgctgggtgtggtggcgggcgcctgtaatcccagctactcgggaggctaaggcaggagaatgccgtgaactcgggaggcggaggttgcagtgggttgagatcgcgccattgcactccagcccgggcgacagagcgaggctctgtctggaaaaaaaaaaaaaaaaaaaaaacctagccaggcccagtggctcacacctgtaatcccagcactttgggtggctgaggtgtgtggctcacttgaggtcaggagttcgataccagcctggccaacgtggtgaaaccccatctctactaaaaatacaaaaattagccgggcctggtggcgctcgtctgaaattccagctactcgggaggctgaggcagaagaatcgcttgaacccacgtggcggaggtcgcagtgagccaagatcgtgccactacactccagcctgggtgcagagcgagactctgtctcaaaaaacaaaacacaacaaaacaaacaaacaaacagcgacaaccccctctcaagaataatctgaccctaatgtcagagatgctgatacccagagaccctggtcgaagggatgttccagccaggagcggctttctcgtgaactgtgcatgttgtttgcatcccgacaggttcaagtgacaaagctgggcaggctgaggccaccaaagggtttcctgggtccctgttcctgccacacaccttgaatcctcaatgccaaggcaactgcaaacccgagggaccccaggggggacactaggtctggacatgaaggtttggcagcaaactgtcaggacccccggagagaaccctgactcctgtgccaacccaactgtgtctggctcaacgctcgacgctcaaacacagcaaacggcaagaaggcaagtccaggatatacgttttggcaaaaatggcagccgtgggggtggaggtggaggaggacatgcacggagggcttaaacagggctgtgtttttttttttttcttttagatggagtctcactctgtcacccaggttggagtgcagtggcggatctcggctcactgcaaactccaccccctgggttcaagcaattctctgcctcagcctcctgagtagctgagattacaggcgcccgccaccgcacccggctaatttttgtatttttagtagagacggggtttcactatcttggccaggctggtcttgaactcctgaccttgtgatccacgtgtctcggcctcccaaagtgctgggatgacagacgtgagccaccgcactggccggggctgtgttttcatctggaggtttgcacggggccggggcattgtaaggctaagcatgggaatttcagtctctcccccagaaccttctggagagacaccactgcagctaccaccgctgcagctaccaggcaccagctgaccaggagggaggaaacacaaggctgctgtgtctggggtcagccagcaggccgggggtgagggcgggggtgacaggggagccagcacacttgttgtgcacaaagttccttgtgacagtgagttcgtcttggcctctgtcccaagatgaggttttgatgacacgcatggaatttctaacaatgaaatggagtgtgtggttttgctcacgcttacatccccttttcttgtctatccaaattccattacgccttttcttgctaatgcagaaacacggccaaatcctgggctgccccaggaagtgccgaggcctctttccgctctcagtggaaaagggaaatgtggctgccttgggtctggggtgccctgattctcagaatccctgtgggatggggaaagagtgtttgggttgagactggctcacaggaagtgggtagaatgcagcagaaggagcggctgggaggcactctctcatccagcccccgtggcgaccctccttgctggcttattttgagacggagtcttgctctgtcgccgaggctggagtgcagtggcgcaatctcggctcactgcaacctccgcctcccgggttcaagcgattctcctgcctcagcctcctgagtagctggtagctgggattacaggcatccaacaccaagcccggctaatttttttattttttggtagagtcgcggtttcaccatgttgttcaggctggccttgaactcctgacctcaagtgatctccgcccacctcagcctcccaaagtgctgcgattacaggcaggagccaccgctcccggccacctctgctcacctcctcaccaagccccagcttctgtgactgtcccccagggagagtgaccatggccctgctgggctctgaggggcttgtgcagatgagcaggtggcctacacagcctgagggaccaccagctgctctgtggcaagtctcgtgactccaatcccgctctgcctctggccagcccccgggccttgccacatcttttggttgccgagcctcagtttccccacctataaaatggggacaatgagccctgctccccagggatcctaggagaactaaaggaattggagcagtggacctggcctgcagggggcacgggagaggtatctgctgagtcgctgagtagggggagctgaggatcagggaggcgtcagtggtggggatggcccggctgctgggaacagggccaggggacttagccagggcccgacgagagctgcctgatgtcattgctggagcctcttgtcatccctcccagcagatgctgcagcatagggacctaatccccacggcacgtggccacatggctggcagcttgagcttgcggcctggagacacctgagccttgcccaggcagctccgtgccacctgccgtccagccacgctgccatcagccagcacttgtgtgtcccagaggacggggctcagggcaggctccagggacctcaccctggccgtttgacctccagcaaaggaggtctggtctcccggtcagaaaacaggagagagggcagggacttctccatggagaatatattcatggagaaggacgtaaaaggatccagaccagacaccacgggcacatgcgacccctcggccatcggccaggttttaaatcatcactgtcttcgtcgtcatcctgagtgtcatttgtgtgggggccgggactagggtgaggccatgcggcactcaccttgggggcaaaatctagggaacgccaaaaagccctgccgtgctggtaaattatattttcatacaatcttttattatttatataaaaatatatttatatgtatttattaatatatatttatctattatctataatatataaatatgcatttataaatatataaacaaatatatatttataaatatataaaaacacatatacatatttataaataaaatatatatttaaaaaatatatatatatacacacacatattttgagacagagtctcgctctggcccccaggctggagtgcaacggcacgatctcagctcactgcaacctctgcctcccgggctcaagtgagttttctgcctcagcctcccaagtagctgggattacaggcatgcgtcaccacgcccggctaattttttttattttcagtagagatggggttttgccatgttggccagtctggtctcgagcttctgacctcaggcgatccacccaccttgacctcccaaagtgctgggattacaggcgtgagccacggcgcctgactgcttgtgtgttcacagctgccccccaacgcttgcattcccgcctgagctccgcctcctgtcccatcagcagtggcatcagattctcatagaagcgtgaacccaattgtgaactgtgcatgtaagggatcttggttgcacgctccttatgagaatctaatgcctaatggcctcgactggccaacatgataaaaccccatctctactaaaaaatacaaaaaatcagccggaaattgcttgaacccaggaggcggagtttgcagtaagctaagatcatgccactgcactccagactgggcaacagagagagactctgtctcaaaacaagcaaacagaaataatctaatgcctgatgatctgtcactgtctcccatcacctccagatgggaccatctagtttttatttgtttgtttgttattgagacagagtctcgctctgttgccgaggctggagtacaatggtgcgatctcggctcactacaacctccgcctcccgggttcaagcgattctcctacctcagcctcccaagtagctgggactacaggtgcccaccaccacgcctggctaatttttgtatttttagtagagatgaggtttcatcttgttggtcaggctagtctcgaactcctgacctcaagtgatccacccgcctcagcctcccaaaatgctggggttataggcgtgagccaccacacccagcccagggaccatctagttgcaggaaacaagctccgggctcccagtgatcccacattatggtgagttgtggaattattttattatatattacaatgtcataataacagaaacaaagtgcacaaaaaaagtaatgcgtttgaatcgtccccaaaccatcctcccggctccaccccccccacctccccactgtctgtggaaaaactgtcttccacgaatccactccctggggccaaaaaggttgaggactgctgccttaaggaaccagaaaaggaagaacgaaggcagccccaagccagcaggaggaaggaaattgtaaagatcagagcagcgataaacgagacagagatgagaaaaactggcgagtcgacgaaaccaaaagttggttctttgaaaagagctaggtgattgacaaacctctagcggggctgaccaaaagcaaaaccaaaaaaaaaaaaaaaaagaggaaataagatgcagataactacacgcagaaacgaaaggaggacattactaccaactgtatggaaataaaaggcattatcagagaacacggtagcattatgaaccagtgtgtgacatccaattaggtaatctacacgaaatggacaaattcctagaaaaacgcgaatgaaacagatcagcgatggtttcaggttcagctcacatctcttagatactgacatgccagcatggtgctgagcatatatatatatacatatatatatgtaatatacattttatatgcaatatatatgttatatattatatgcaatatattatgttatatattatatactatatattatattttatatgtacatctcattacatatatgtacacattacatgtaacatcacattacatatatgtaatatcacatgtaataaatcatatcacatacacgcacatattacatgcaatatatcatactacatacatgcacacgttacatgtaatatgttatattacatacatgcacacgttacatgtaatatgttatattacacacatgtgcacattacatataatatattacatatatgtacatattacatgcaatatattacatatatgcacatattgcatgtaatgttatatcacacacatgtacgtatcatgtgtaatatatcacatacatgtacatattatatgtaatattgcatacatgtacatattatatgtaacattgcatacatgtacatattctatgtaatattacatacatgtgcatattgcatgtaatatattgtatgtaatatattatatgtaatatatattacacatatgtatatattatatgtaatatatattacacatatgtatatattatatgtatatatgtatacacagtggcgtgcacctatagtcccagctactcaggaggctgaggcaaagggattgcttgaacccaggagttcaagattgcagtgagctatgatataatagtatattatagcagtgaactataatatattatatataatatataatatatatatttttttcttttctttagagacctggtctcactctgttgcccagcgtggagtcccatggtgcaatcacaatcacagctcacagtagcctccacctcctgggctcaagtgatccttctgcctcagcctcccaaaatgctaggatgacaggcacgtgccaccacactgggtatattttttaagagaccgggtctcactctgtcacctaggctggagtacagtggtgcaatcatagctcactgcaaccccgaactcctgggttcaagcaatcctcttgcctcagcctcctgagtagctgggactacaggcgcacgccactgtgtatacatatatataggtatatgtgtgtataaaatatatatgctatatatatatatatatttttttttttttgagacagagtctcactctgttgcccaggctggtgtacggtggcatgatcttagctcactgcaacctccatctcccaggttcaagcgattctcctgcctcagcttccagagtagctgggattacaggcacctgccaccatgccctgctaatttttgtacttttggtagagacggggtttcgctgtgttggtcagcctggtctcaaacacctgacctcaggtgacccacctgcctcagcctcccaaagtgctgggattacaggcgtgagccactgcacctggctatttttatatttttgtatctatatgcttgtttaatctttgcaaccttcctgcaaaacggagaacgtcatctccactgcagacagttgacgcgaacccacccaaacggggcagagctggtaaaaggggatctgggatttgaactcaggtttcctggctctgagcccggagcccttttatgggatgactcaacctcccaaagtgtcaggcacacataaaagactggggcttgtttgttcctttttctaaaaaacaagagattccaacctcatgaagtaagagaaaatgccacataccttttttagttttcccaggaatcacagcttgctgtacaccctgtttaaaaaaggagagagaaagagaaaagcatggttacatattttttacttacaaggaactcacagagctacctccagcttttatcggagaacgacgttgctgtccccaaaaatgaggcatgggaattcgaaagggccgtgccctccggagaaaacgggggcagaatccactttattctttaccaccgatccgtgcggagaagacctggatgcttctcttgctggacaacagggcaaattatcttccagaaacttgtgttattccatttcagaacaaggaagccccaaccccacagtcaaagtccagtccatcagacacaccagtgcaagaaaaacaaaatacccaggcacggcgccttcccatggaatacttcggtgtttttccatctctgatttctacttttatgtaagccacgtgccgggcaaagggagaggtggaaagtggaaactggggacaaaccaattaaccccgaatggaggaagtgacaggtatacggggggcaggaaggccgggggtctcatgtgagccgcccagggccaggaggtcaataggaaggaaagaacgtctccaggccccggtgattggtctccgggggtcggggcggttggggcctttggagctgcggttttccatggaacggaatcctctgttccaagccggaccctgcacagggccaggccccgtatccgtctccaatgcacagtgcacggatcgcgagggggggcccacggccgtctccaatgcacagtgcacggatcgcgaggggggcccacggggaccaccttccgtggtctttcctgactcccactaaggtctggagggagatccaggcagcgatctgccccctccagcttcgcggcagcctcctatttcgtggacaaggaggcccgaggcaggcaaaggcccctgccttgcggagcgtctacaccggccgaggtcatggggccgggacttgcgcacaatgaacccagatgccaggttctgtgtctcccggttaggccaccactgctctgctgctgagccggcagccccacttggagaagccaggagctgcaccactgtcagctctaggggaggccccgtcctgcctagcggggctcaccctgcagtgggcttgcccggcgaggtcagcagacgcccctgcaccgggcccaacccaggcccagcttcctgagctgctcgaggccgggctgggccgggttcacgtggccaaggctgtttccctcctgccctgaagggcccctgtggtctctgaagccggccaggcccctcttccgtcacaaacatttgctatttccacaaaccaatgggtttttttccaccgacacaaagaagagccacatggctgctgctcctgggctggagtccgggccacccacacacgacactttctcagcagccctgcgccccggggctgcattggaggccaaggaagctgaggtcggcgggaagcctcctcaccttgcagcccagctggggaggccgagtcccggctttcccagaggctcccgggtctcagctgcaggaaggcggtgactgaggtcaccttctcctaagccagggtctctcctcccacccagcaatacggacaccagcgccggattgttctccggggcgggagcatcctgggctctgcagggtggtgagctgcgtccctggcatccacctgctccgtgccaggagcaccccccagatgtgttggccacaaatgtccccagacactgccccgggtcccctggggggcagaatcactccgtgtgagatccctaacctcttagtgacctagagacatccaggggggctgcctcccctcccacctctacacacacacacgcacacacagacacacgcacactcacacacatatgcacgcacacagacacacgcacacacgtgcacacaggaatactcagacacacgcacacacgtacacacgtgtactgcacactcacgcacatgcacacaaagacacgcgcacacacgtacacacaagacacgtgcacacacatttgcatgcacacacagacacacatgcacacacagacgcacatgtgcacacacacgtgcacacacatttgcacacacagacacgtgcacacacagaggtgcacatacacgcacagacacacatgtgcacacagacacacacatgtgcacacacacagacacacacacacgtgcacgcacacatgcacgcaggagcgagcgcctccacccagccctgcatctgaagcaaggtcctgctagtaaacatgcacagactcaagaaacgaggggctgcaggacttttcctcctcctgcccaaaggcacctgcactcacaaaagactcagaggctccgcctggccgggtcagcgaatggagttgtagcaccgtttcaggaccgtgatagagaaagacgggaagttagacttctgacccatcacaaactctgagtcaaagtgcgatgtgcccaggccagcccggtgtgacctcagctcctgatccataaaatcaggacagtgaccgaggatgctggggccacctcacctgcagccccgggtcagcctcagaacccacaggactttgaccctgccccaggccatggtccttgaccagggaaccacagctccttattctgatggggtgactcggtgcatttctctctcaggcttactttttttctctttgagacagagtctcactctgtcgcccaggctggactgcagtagtgcgatctcggctcactgcaacctctgcctcctgggtacaagcgactctcctgcctcagcctctcaagtagctgggactacaggcacgggccaccaggcctgggtaattttttgtgtttttagtagagagggggtttcaccgtgttagccaggatggccttgatctcctgacctcgtgatccgcccacctcggcctccgaaagtgctgggattacaggcgtgagccaccgcgcccggcctctcaggcttacttttaggtggctggaaatactgcttttcatgtgcacactgtattattttcatcatccttgccacagatgggcaccgtgtttttttgtttttgtttttgttttttttttgagatagggtctgttacccaggctggagtgcaatggcgtgatcacagctcactgcagcctcaacctcctgggctcaagcgatcctccctcctcagcctcctgagtagctgagactacagccacatgccaccacacccagctaatttttattcctgtagagatggggttttgccatgttgcccaggctggtctcaaactcctgggcccaagcgatcctcccaccttggcctcctaaagtgctggatgacaggtgtgtgccactgcacccggccagcaaaaatgggtttaaaggcagatgatcaaaccatgttgtagaacctcaatttttaaaaataagagagtgtgtgtagatgtctggggaaaggataaagtgctgggattgtggatgattttcctctccttatgtgattctcagattctgtaaaatgaagttatataactttctttcctcttctttctttctttctcttttctttcttccttcctttccttctctttctttcttttttctttctttcttctctctctttcctttttatttatttattattttttttgggacaggtgtcattttgtcacccaggatggagtgcaatggcgcgatctctgctcactgcaacctctgcctcctgggctcaagcaattctcctgcctcagactcccaagtagctggcattacaggcatgcaccaccactcttggctaatttttgtattttcagtagagacggggtttcaccaacatggccaggctggtctcaaactcctgacctcatgtgatccacccaccttggcccccccaaagtgctgggattataagcgtgagccatcgcgcccagccagttatattcctttcatagtcacaaagaatatatatatatacacacacacacatatatatacatatacatatatatccacagttgattagattctcattatttgtggtagttctgttctgtgaagtcaccacaaaaactgagtttgcgaacacaaatcattactcctagagaacatttttgtaggggtagtttcctttgagtttcaggaaactttcctttatctgatcaatacatgacctgttctgtgtgtctttttttttttttttttggagacagggtctcgctctgttgcccaggctggagtgcaatggtgcaatctcagctcactgcagcctcagtctcctgggctcaagtgattctactgccttggcctccagagtagctgggattacaggcacccaccaccatgtccggctaatttttttttctctcaagatggagtttggctcttgttgcccaggctggagtacaatggtggatgtcggctcactgcaacctccgcctcctgggttcaagcgattctcctgcctcagcctcccgagtagctgggattacaggcatgcaccgccatgcccagctaattttgcatttttagtagagacagggtttctccatgttggtcagactggtctcgatctcttgacctcgtgatccgcctgcctcagcctcccaaagtgctgggattacaggcgtgagccaccgtgcctggctcaaaggtgtcttcttgaatgcctatcgatgatgtgagtgttgaatagggcagctgctctctcagtcctgcctgagcaaagcttttctcacctaccagttcctccacgaggccctgagggacacgagaaggggcctcagcacgatgcctggggccactgcaaacagcaaaatcaccaaaaagagcacaaaaacgcaaaccccgaggctctcgctagacagtaatgagggcgtggtccacctaggaggggaaacggggaggcggagcgtggcctgggctcagggaacgcacgtccatgactctaatttcttgtctctctctgcgtgtccaaggataagagggaaagtaccccaggcattgatttggggttcacaaatacacaccaagccggcgaattcgcaaatacggactccgtgaatgacaaaggggactacagtacaaacccagcctgtccctcgcgcccctagtgtgctgagggcctggccgtggcaggaaggaagggaccgcctcagaccccacatcaccccatcccccaggtctgtctcccaccggcccccagggtcgattctcaggagaggaggtccgacctgctttagggggcccaagcaggaccccttacctccacatcttatttctgtgtcccacccagcccttcccttgaggcagtgattctcacctgggagtggccctgctcccaggggaccctgggcggtggctggggacattgtggttatccagacttgggggtgctcctggcatggggtaggcggacgctgcggtgcccaggacggccctgctccagagaaggatccagccccgatgtccacagggcctggggggaccctgaattcattatttggaaaaaagctgggcgcggtggctcacgcctgtcatcccagcactttgggaggccgaggtgggtggatcacttgatgtcaggagttcgagaccagcctgaccaacatgggtagaccccgtctctactaaaaatacaaaaattagccaggcgtggtggtgggtgcctgtaatcccaggtactcaggaggctgaggcaggagaactgcctgaacctgggaggcggatgttgcagtgagccgagatcgtaccattgcactccagcctgggcgacagaaggagactgtttcaaaaaaaaaaaaaaaaaaattatttgggaaaacagttgaatgcaatttctgctcacagtaggcatcagaataagctcccgatggggcagacggtgtgtaaaccagagggatcccagctcctgggactcacctcctctctccctcccccattcaaggtgtggattgcaatgtgtgcagcctcctgggacctcagcagggcagaggatcatgggacgcagagtctcttgggggtccgtggaatcccataacccaggggggctcaaccaggatgattctgctcccaggggatgctgggccatgtctggggacatctgtggctgtcacgactgggggtgctcctggaatggagtgggtggaggccagggacgctgttcagcaccctgcagtgcccaggttggcccaaccccagagaatgacccaggccccaatatccacggtgccctggggagaccctggttaggtcctgtcacagttttggtgtcagcaccactgcccttctgtgcccaggaggggccctgtcctccccttgtcccttcctctctgcaccctggcctgggtctttgaccctcccagctcttagcactcttggacacacaatccccacaagagcctctctcagaaagatagaaatgacactggttggccgggcgcagtggctcattcctgtaatcccagcactttgggaggccgaggcgggtggatcacctgaagtaggagttcaagaccagtctgcccaacatggtgaaactccgtctctactaaaaaaaaaaaaaaaaattagctgggcatagcggcaggcgcctgtgatcccagctactcgggaggctgaggcaggagaatcgcttgaacctgggaggcagaggttgcagtgagccgagattgcaccattgcactccagcctgggtgacaagagcaaaactctgtctaaaaaaaaagaaatgacactggcttctttctcttctttgcactctgaaaagcacctgagagcaaagtgcccagcagaggcagctgccccggggcgacccgagaaacaggaaaccctgtttctgagcttcgcaggctcttctgggagaccagcgggtaatccccttcctccgacatttctctgagaagtctctctgcgttctgcttctcagaaagaaaccagggtccggggcaggcattcacgccctccacccactcaggggtttgcagtaacacccttgggatctgcaggttcacacagagccagagccgtgagtcaccgcagccccggagctgccggggtccccacctgctcagccccaggaacacacatctacagcgggttcctttttcttttctttctttttctttctttttttttttgagacagagtctggctctgtcgcccaggctggagtgcagtggcgcgatctcggctcactgcaacctccgcctcccaggttcaagtgattctcctgcctcagcctcccaaagtgccgggattacaggcgtgagccaccgcgccccgctccttttccttttcttttaaatgattaatactcatgatttctgttcagctgaaagctacactcactttcaatacctacaacagggtttttccccccgggcactgtggacactggggccagatccttctctggggtggggccatcctgggcactgcagggtgctgagcagtgtccctgacctccacacactccatgccagcagcaggtgcccccagacatttactgagtgtaccctggtcaggggggacaggatcgctcccagcgtacactggaatcttaggggattccacagacccccaagagactctgcgtccataatcctctgccctgctgagttcccagaaggctgcacacattgaaatccacactctgagtggggagggagagaggatgtgagtcccaggagctgcagtccctctggtttacaccatcggccccatcgggagtttattctggtgtccagtgtgagcaagggacagattcaatctttttctttttctttttttttgttttttgagacagagtctcgctctgtcgcccaggctggagtgcagtggcgtgatctcggctcactgcaagctcctcctcccgggttcacgccattctcctgcctcagcctcccaagtagctgggactacaggcgcccaccaccacgcccagctaattttttttttgtacttttagtaaagacggggtttcaccgtgttagccaggatggtctcgatctcctgacctcgcgatccacctgcctcagcctcccaaagtgctgggattacaggtgtgagccactgcgtccggcccagtatttttcaaataatgaacacaggtctctcccgttctgtactctggacattgggcctggatcattctctggggtggggccgtcctcggcactgtaggctgctgagcagcgtccctggcctccacccactccatgctgggagcaccccgtagtcgtgactaccagaaatgtccccacattctactcaggatcctaagagaaccactcccaagcattattgaggtcacacttttttttgtttttgttttgagataggtttcatttctgtcgcccaggctggagtgcagtggcacgatcttggctcactgcaacctctgactcccgggttcaagtgattctcctgcctcagcctccctatagtagttggaactacgggtgtgcaccaccacgcctggctaattttggaatttttagtagagatggggtttcgccatgttgcccaggctggtcttgaactcctgacctcaagtgatctgcccacctcggcctcccaaagtgctgggataataggcatgagccaccgcgcccggcccaggtcacacctttgaacacttcagtgggctcattttatgtgtgaatttttagcctaattgtgaactgttgagttatttaaaccttcgcacccaaacttccttggtccagagaggatttgaagctcatacataaacaacacagcagcattgcaaatcaaggaatggaggagacggtgaaggtggtatttgggggtgttgggtggggtgggagaaacagcagggaaaaatcaaaggatggttagccaatgagaatggtgttcgtgtgtgtaagggcaggctcctaaacaggagtgtagctaattttcaactcaagaaaaagaatgtgtattgaatgcagtgggttgaatagtgtcccgcaaaagctcacgtcctcctggaagcttggcacgtaaccttctcagagatggggtctctgcagatggaagatgatacggatcttgggatgaaatcatcatcctgtttgtagggtgggccctaaatccaatgactggtgtccttttaagaaggagagacacaggctgagattggtggctcacacctgtaaacccagaactttgggaggccgaggcgggaggatcgcttgaggccaggagttcgagaccagcctggccaacgtggtgaaaccccatctctaccaaaaatacaaaaattagccaggcatggtggcgtgcacctgtaccactcgggaggcggaggcacgagaattgcttgaacccaagaggcggaggttgcaatgagccaagatggtgccaccgcactccagcctgggtgacagagcaagactctgtctcaaaacagacaaacaaacaccaagaaggagagatttagagatgcagaggagaggacatggctgtgtggagatggaggcagagactggggtgacacggccacaagccagactcctagagcccccagaagctgggagaggccggaaggaccctgcccctggagtctctggagggagcctagccctgcagacaccttgatctcagacttctggcctccaaaagtaggagaggagactgtcacaaaatgtctgttatttaaagccccgcaatctgtaataatttgcatggcactctaggaaatgaatacattggtcatttaaaaaaaaaaaaaagaatcaggccagatgcggtggctcatgcctgcaatcccagcactctgggaggctgaggcaggaggaccacttgagactaggaggttgagaccactctggtcaacacagtgagaccctgtcttgaaatggaatgaaatgaaataaatacaataaaatatccgctaagcttctgtgtctccctgtagccatgacaacagaagaccctgaggtggagaagatgacgccttcctgttggaatcacgggctcagactacatggggaaaacggaaaacacacgtgcaaccctcacacaacgtgtgcaccctgcaggctcaaaaaccaaagctgtgccaggcgcggtggctcacacctgtcatcccagcactttgggaggccgaggcgggtggatcatgaggtcaggagatcgagaccagcctggccaacatggtgaaaccccgtctctactaaaaaaatacaaaaattagctggacgtggtggcacacgcctgtaattccagctactcaggagactgaggcaagagaatcacttgaacccgagaggcggaggttgcagtgagccgagatcgtgccattgcactccagcctgggcaatagagagagactctgtctcaaaaaaaaaaaaacaaaaacaaaagctgtttgcgtcaaaggaagggtcggttagttccttccctccaggactgaatccatgagaactgcagaaatttaggattaggaaccagttcgcccagggttcctaaaacctgcaatcactgggagaggcccatcccacccggaagaacctgattgagtggtctggggtgtgccgggcacagggcagttgagactccaggtgacagttaccggcagctcagggtggaggctgtgtgagcccggccgagtcctacaggaagcgtctgcagagtgtaatgtgctcagcgcttctgcaggggacgggcggaatgatgtgtgcagacattttaaaccatggtagaggccgggcacggtggctcacgcctgttatcccagcacttcgggaggccagggcaggcggatcatctgaggttaggagttcgagaccagcctggccaacatggtgaaaccccgtctctactaaaaatacaaaaattagtcaggcgtggtggtgggcacctgtaatcccagctactcgggaggctgaggcaggagaatcgcttgaacctgggaggcggaggtggcagtgagccaaaatcgcaccactgcactccagcctgggcgacagagccagactccgtctcataaataaataaataaataaatataaaaaataaataaaggggacatttggacacagatgcacacgggagggagaatgctgtatagataggagattggggtgacaaggcagagattgggggtgtcacttccacaagccagggaaggccaaggatctccggccatcaccaggagctgggagtggccctgggatggattctccccactggcttcggaagaacccagccctgcctacaccttggccttggacttccggtctccagagcggagagagaatgaacccgtggtgtctaaacggctaggtctgtggaccttgtacgagcaccccatgaaactcacacaaagccctaaaaggcgtctcagcctggctccgggggaagggtccgagacagcagaccagaactggggccacagcaatggtcgggggacacctccttcccctcccacccccactgctaaaggactggctagaggttgtaaggccagggttggcaacattttcctgtaaaaggccagagagcaaacttctctggctttgtgggtcagatggtctctgttgcaactgctcgactcagccacagaggcaggagaggctgctgtggacgatttctcaatgagtgggcatggtgggtgccaataaaactttatttacaaaaacacactgtcgctgggcatggtggctcaagcctgtaatcccagcactttgggaggccgaggcaggcggatcatctgaggccaggagttcgagaccagcctgaccaacatggtgaaaccccgtgtctactaaaaatacaaaaaaattagccgggcgcggtggcgggcgtctgtaatcccagctactcgagaggctgaggcaggagaatcgcttgaatccgggaggcggagcttgcagtgagccgagatcgcgccactgcagtccacagtccggcctgggcgacagagcgagactccgtctcaaaaaaaaaaacaaaaaaaacaaaaaaaaaacaaaaaaaaaaacacaaaaacaataacaaaaaacccacactgtccatcatgggcccttgctggctgacctctgctctagaatctccttaatttcaagtcattgggttggccgtgatcattcctgtagtgatgcttccagaacacaccttttccatctgcaggtttatttcttctcagttgtcgtcgatttgtgtgtgtgtgtgtgtgtgacatagggtctcactctgtcacccaggctggagtgcccgtggtgcaatcacgctgcctcgacctcccaggctcaagcgacctccctgcctcagcctcctgagcagctgggactacaggtgcacactaccacaccagctaatttttgcatttttttgtatagatggggtttcgccattttgcccaggctggtcttgagctcctgagctcaagcgatcgtcccacctcggcctcccaaagtgctgggattgcaagcgtgagccgctgcactgggccggtgtcctctgtcgtatcctacttaggcactgcctctgacgcttctgtgctccagcggcagagctgagtgctggagccggagactgggccacagagccgaaaacagcaaccctctggccctttacaggaaaagctcgctgccttgtggtctaggatgagacctaaaaggtcacaagtctcctcttcagagcaccagactccgacgggggcagggcaatgtcaactgggcaacagggaagtcacccatctgttcccgggcaccacgcgctcaggcatggaagggagagaagggcgttgccattcagcaggaactcaggaagtagggcgttcacaacgccttcctggaaaatgcatctcaccaggcactccagccacccaaaaacagagacacgggcatgcaagcacacatgcacacacgtgcagatacacacacatatagacatacacacatatacacatgcacacacacacacttacacacatgcacatacacacatatagacatacacacatatacacatgcacacacatacacatacatacacacacatacacacatgcacatacacacacatatagacatacacatacagacatgcacacacgtgcacatacacacatatagacatacacacatatagagacacatatagacttacacacatatacacacgcacacacatacacacgcacacacacatatacacacatatagacatacatacacacacgtgcacatacacacatatagacacacatatacaacacaaacacacacacatatacacatagacatacacacatacatatacatacacacatacatatacatacacacacacatgcacatacacacagacttacgcacatacacagggtctctgtgtgtgcacatacacgtgcacatatacacacatacacatatatatacacacatatacacacatacacatgcacaaatacacacatatatagacatacacacatatatacacatacacacatatatacacatatacacaaatacacatatacacatacacatacacatatatacacatacacacatacataaaatatagacacacatatacacatacagacacatatacatacatacacacatacacacatacacatatacacataaatacacatacacacatatacacgcacatatatacacacacatatacacacaaatatatacacatatgcaaatacacacaaatatacacacaagtacacacacatactcatgtgcacacacatatccacactatacacatatacatacatatacaaatatacaaatacacacaaatatacgcatacagatctgtgcacaaaaacatacacatacacatatttacacacatatacacacaagcagacacatatacacaaaagcacaaacatatacacagaagcgcacacacatacacacaagcatgcaagcacacacacacatacacacaaatgcacacatgcatatacccacaggtgcgcgcacacacacacaactcagtgaagggagaggccccagcatgaggcacctgctggggatcagttccacaaagggtgcagcataactgctggagcaggaacagctacacagtggatggcgatcatctccattctctctctctctctctttcttttttttgtgagacagagtctcgctctgtcgcccaggctggagtgcagtggcgcgatctcggctcactgcaagctccgcctcctgggttgacaccattctcctgcctcagcctcccgagtagctgggactacaggcgcccgccaccacacccggctaattttttgtatttttagtagagacgagggttcaccgggttagccaggatggtctcgatctcctgacctcgggatccacccgcctcggcctcccaaagtgctgggattacaggcgtgagtcaccgcacctggccaatcatctccattcttaaacaaaaagtgtgagacatgacaattatgtcgctatcatactaaatagggtctctcttagcactgtggacactgtagccagaccgttctctggggtggagccatcctgggcactgcagggtgctgagcagcgtccctggcttccactcactccatgccaagagcatccccatcgggacaaccacagatgtccccagacatcacccgtcccccagtcatgacaaccacaaacgtcaccagacatctcccggtgtcccctgggagcaggatcagccccagctgagaaccaccacactagaacaactgcgacaaaaatagccacaaaatcctagaatccagcagcacaggactgagcaatgtcagtgacatggggccaatgtttgtgcctccggatctcacactgaaatgcgaccccctatgttggaggtgaggctgggtgggcggcatttgggttgtggcgggaggggggtccctcatggcttggtgctctcccctcgggaatgagcgagttcccactctgttagttcacggacgacctggttgttaaaaaaagcctggcacctcctccctcctttctctcgctccctctctggccgtatgagatgcccgttcccccttcaccttctgccatgagtggaaacttcctgaggcctcaccagaagcccaggagatgctggcaccatgcttgtatggtctgtagaactgtatggtctgtagaactgtgaaccagataaacttctatgctttataaacccctcagcctcagctctattcctttatagcaacacaaaacagactatgacagtcaggcacggggagacacgcagagcttgactgggcctcaggtcaggaaggaaacttccctttccagccacatgtggatggggcccgtgttcactggggaagtggcatctgcaaacctcagctcttccatctgtaaaatgggcatctccacacccacttagccgagaactcatgagagcaaaggagaagctaaatccctaaggacgcagccccataatgggccccaggaggagcttgagagagacagacagcccaggagccaagtctcagccatgaacagaaggtactggaaggttttccaggagcagacagcgctcctcggacagtggagagatggtaaaggacgtgaacccacaattcacacaaggaaacaaaaccccaagcctaaaaacagatgttcagcttggctttttaattttttgagacagggtcttgctctgtcacccaggctggagtacagtggtgcaatcacagctcactgcagccttgacctcctgagctcaaccgatcctcctgcctcagcctccccagtagctgggattacatgtgcacgccaccacgcctggctaatgtttgtattttttttttttagagatggggtctcactatgttgtccaggtgggtctcaaactcttagactcaagtgatccacccaccttggcctcccaaagtgctgagatgataggcgtgagccaccgtgcccggcggagttgtccagctttaacaaacaacaacacatgcaccaataacaggattccaccctggcctctcggactgtcaccgatggaagcctgacgacgcccagtgtcttctaggatctgcggaatgggggcctctccagcacagataacagagggtccctggtcaacatttttggaagaaaatgtggcggcattgtcggaaccgagaaggtgctacctgctgatgcgacaattccatacctacgaatttattgcaaagaccttgttggacacgtgggcaaagatgtctacctatatccttatccttgttctgattgcagaactgtgaatgcttccaaactggaaccatctcaatctgcctgcagaggcgtggttaggccacgttgcatttctaggatgggtagcgtgcaggggtggcttggagggtgcctgcaggctacgttaagtgaaagagttatcagatgtgtggtcacttttcttttcatttctttcctttttttttttttttttttttttttgagatggagtcttgctctgtcgcccaggctagagtgcagaggtgcggtctcggctcactgcaacctctgcctcccggggttaagtgatcctcctgcctcacccttctgagtagctgggattataggcgagtgccaccacgcctggctaatttttgtattttcagtagagacggggtttcaccatgttggccaggctggtctcgaactcctgacctcaggtgatctgcccaccttggcctcccaaagtgttgggattacaggtgtgagccactgcgcccggccagttgaccgttttatatgagtcatataaaatatgggctacctacctatcctgtcccattggcctatttgtctgttcttttgacaatgccacattgtccctctctctttgtgtttttgttgttttgttttgttttgtttttctttgagatggggtctcactgtgtccaccaggctggagtgcagtggtgtgatcatagctcactgcagcctccacctcccgagctcaagcgatcctcccagctcagcctgccgagtggctgggaccacaggggcacaccacaacaccaggctaattttttgttttttagagacagggtcttgctgtgttgcccaggctggtctttaactcctgggctcaagcaatcctcctgcctcagcttcccacgtatctgggactataggtgcatgccaccatgcttgcttaatttttttgttttttgtagagacgggtttcgctacgttgcctaggctggtcgagcaagtttttaattccttcacagagctgtgcaaccatcaacactacgtagttccaacactttttcttttcttttttttgagacggagtctcgctctgtcgccaggctggagtgcagtggcctgatctcggctcactgcaacctctgcctccccggttcaagcgattctcctgcctcagcctcctgagtagctgggactacaggtgtaagccaccgcgcccggccctttttttttttttttttaagagttaacgatctgttgcccaggccggactacagtggcacctccttatctcggtgaagccttgaattcctgggctcaagcgatcctcccatctcagcctcccgagtagctggggctgcagacatgaaccagcatgcacggctaacttaaaattcttttcttctagagatggggtctcactatattgcccaggctggtcttgaactcctggtctcaagcaatcctcccacctcggactcccaggttgctgagattacaggtgtgagccactgtgctggctgaattccagaactgtttcatcgccttaaatggaaaccccgtccgcattagcagtcacccccgtctcctccaaccacacatccatgcatattctctgtggatctgcctgttctggaaatttctcctttttttttttttttttttgttttgagacagagtcttgccccgtcgcctaggctggagtgcagtggtgcgatcatggctcactgcaacctccgtctcccaggttcaagcgattctcctgcctcagcctcctgagtagctgggattacaggcgccaccacacccggctaattttttgtatttttagtagcgacggggtttcaccatgctgcccaggctggtctcgaactcccaacctcaggtgatccgcccgcctcagcctcccaaagtgctgggattacaggcctgagcccccacgcctggcctggcttccttcatgaaataggtattgaggggaccacagttccgagcccactccccagccaagtttctgcactgatggaggaggcggggctagtcttagggaagcggctagaagacttaagatcttgtctgtaccctgtcccctcacagctgcgtggcttccgacaagctgcttctgcgctatctgtggagaacgatctaaaagtgggattggggctgggggtggtggctcacacctgtaatcccagcagtttcggaggccgaggcgggcagattacctgaggtcaggagttcgagaccagcctggtcaacatggtgaaagagttagtgtcttgttcacggcgaaaccccgtctcgactaaaaatacaaaaattagccaggcgtggtcgtgggcgcctgtaatcccagctactcgggaggctgaggcaggagaatcgcttgaacctgggaggcggaggtggcagtgagccgagatcacgccactgcactccagcctgggtgacagagcaagactccatcttaaaacaaaaacaaacaataaaagtgggattggcatttccctcccgtggtcatatgcgaacgggtgaattaaattctttctggaagaggctggaaaggcactgcatgaatgggacataccgtgggtgccacggaccagctgctgcgaggtacggccggagttctgccgcctcggggaggcctgggtatcccgagaccagagatgctgccttctcaccttgggtgcctgggtctggcccagagcccgtcacacctgggctggtgcagtccaggtgaaacccgccctgccagccacccccaccatctcccggggtgtccctgctgggcctgcattctgacatcacgccttcaaactcaacggtgaggccgcgggaacacgcatctcatatgacgctggagccggaagatggggcttggggctttcagcccttcctctccctctctcttttctcactacaatgttgtgccgccatcaccaccatcctctccagaactttctcctcttcccaaactgaaactctgtccccatgaaacactcactccctgtccccctccccagcccctggcactcactcatcctacttcctgtctctgtgaatctgacgactctagggacttcccaggagtgggatcacacaggatacgtccttttgtgtctggatcctctcactgagcgtgaggtcctcaaggttcatccacgctgtagcccgtgtctggattcccttccttttcatggctgcgtaatattccactgtctggttggaccatgctgtgtttatccactgatgggcgcctggggtggcttccaccctggggctgttgggaatcatgccgctgtgcacttgtgtgtgcaaacacctctttcagtccctgctgtcagttctgtggggtctatccccaggagtgggattgctgggccctatggtaattccgtgtttaccatgtgagaagctgccaggctgggccttgttccatccccaccagccacgcacgagggtctgtttctccatctcctctcccgctcttgtccgaaaccgcacttgttatcagagcctcagcgtcctgcctgttaaatgggctcgtggtttctccaaggctgctggcaggccctgtgaaaggctatcagctccagctgctgttaggcttaggggcacaatggttaactctgagctgtcagggaaccagggaagaaaggctggttggaatctctctttcttttttctttttctttcctttttttctttctttcttttttttttttttagatggggtcttgctctattgcccaggctggagtgcagtggcaccgtcatagcttactgcagcctggacctcctgggctcaagctatcctcccacctcagcctccagagtagctaggaccacaggtttgcaccagcctatccagctaatttttaaaatttttttgtagagacagggacttgctgttgccaggaactactgggttcaagcaatcctcctgcctcggcctctcaaagtgctgtgattacgggtgtgagccacagtgccctgctcgagtctttttgggcatcctttgggattgatctggaaagctccagggaagtgtacaaagcagaacgggcgcctcctcagggcgtgtggacacgcaggcacacgcaggcacatgcagacacgcaggcacacacagacatgcagacacacgcaggcacacgcagacaggcaggcacacgcagacacacgcaggcacacgcagacacgcaggcacacgcagacacgcaggcacacgcaggcacacacagacatgcaggcacacacaggcacacgcagacacgcaggcacacgcaggcacatgcagacacgcaggcacacgcagacacacgcagacaggcaggcacacgcagacacgcaggcacacgcacacgcaggcacacgcagacacgcaggcacacgcaggcacatgcagacacgcaggcacacacagacatgcagacacacgcaggcacacgcagacaggcaggcacacgcagacacgcaggcacacgcagacacaggcacacgcaggcacacgcagacacgcaggcacacgcaggcatacacagacacacaggcacatacagacacacaaaggcagacacatgcagacacaggcacatgcaggcagacacacacatgctcacactcaggtacacgcagacatgcagacacacacacagacacacacagacacatgctcacactcaggtacacgcagacatgcagacacacacacagacacacacagaaccagacacacagatgcatgcagacacacacagacacatgcggcacgggcacgtgctcccagagcaggagttgtgaggctggcaggctccaagactgagtttcccaacccaccgcagtggggcggcctcggatgacgtgcaggcgtgcagcccggacggccccaggggactgcagcaaaaacaaacatgccgggttgattccagcagaacccttcgacccaggcctgcacacggtgtgctgggaatccgccctgggtggggctgacccactccctcctagagttcaccgtggtccctggatgcttgctgaccccagggaggacagggcgggccgcggcaggcgggggacgggcactgcagcagctggtggccaccctcacacgtctgggaaaccaggaacccttgggaactaaacttggtcttttttattttattatgtatttatttatttatttatttaagaaacaggggtcttgcttcactgcccaggctgagtgcaggggtgcaatcacagctcaatgcagcctccacctcctgggctcaagcgatcctcccacctcagcctcctgagtagctgggactacaggtgcgtaccagcccatctgggtaatttttaaaacttttttttacagatggggtctccctgggttgcccaggctggtctcaaactcctgaacgcaagcgatcctgctgcctcagcctcctgagtagctaagattacaggagtgcagcatcaccctggctaatttttaaaatttgttctaaagacagggtctcgctatgtggcccaggctggtctcaaactcctgggctcaagtgatcctcccacctcagcctcccaaagtgccgggattacaggcgtgggcctctgtgcccggcctgaatttgctcttaagtcattcacgctacgtgagtcaccagggctgtcccgtgtgcaaagttccagtaagtctttgtattcctgttggcagggtcaggacaaggtccacctcgcaagctggggctgtggggcagtgagctcagtctctgtgttgcgtaaccaattgccatccatgtggcgccttccaacacacatccacttagtacgtcacggtttgtggggtcaggagtccgggaacagccaagccagggcctctgttcagggtacccccagggctgcagtctgggtgttggttggggctgcgtctcatccaaggctcgcccggggaaggctcttcatccagcattccctcaggctgttggcaccatttgcctccctgtggttgtaggaccggggtccctgtttccttgctggctgttgcctgggggacactcccagctcctatgggccacccttgggtcctagctatcagaccctcctcgggccttctcgcaatgcaccgctcacttcttcacaccaggaaccagcaggggagtgtcttcccacaactctgctaagctagagtcttctgggtgggcgtggtggctcacgcctgtaatcctagcactttgggaggctgaggcaggaaaattgctttaagccaggaggcggaggttgcagtgagccgagatcacgccactgcactccagcctgggtgacagagcaagattccatctcaaaaaaaaaaaaaaaaaaaaaatcagcgtaatattttacatattatatatgcatgtaagcatttgctacatatttatattgagaaataaatctaaaaagaaaatgtagaacatccctatataaaatgttatggtgttattttcctttttttttttttttgagatgaagtcttgctgtcacccaggctggaatgcaatggcgcaatcacagctcactgcagcctcaacctcccaggctccagatcctcccacctcagcccctcgagtagctgggaccacaggtgtgcaccaccacgcccggctaattcttttatttttttgtagagacggaggtctcgttgttgcccaggctggtcttgaactcttgggctcaagtgatcctcccaccttggcctcccaaagtgctgagattacaggcgtgagccaccgcgcccggctacgtgcttgtcttattcagcattatgacatcatagagggtgctgattcttaggggctttgagggtctctgagggctttgaggctcagagatctgctgagacacaggtagcgtaggcagagctgggacaaatcccccgttagagccgggggccctcggagaacccaatacgggacccagaggaccgagggcagcctagtgccaactcctgactcgccctgttctctactatgttaggaagctatttgcagttttgtatttgatagaatctcttcctgaatgcttgctccgatcctttgtggaatgaggcagaatataaataaatcaacagaaaacggtgctccagccacaagcaagagactgcccgtcctgcagggcctaaggaattcacgagcaacgcccgcccaggggctgggctcaatggctggcagccacaggtttcatcgctaaccaggccggagaagctgggcagaaaagcacctgtttgcagcttttcagcaggacctctccccctcagccctgtggacattggggctggatccttctctctggggtggggccgtcctgggcactgcagggtgctgagcagcgtctctggtctccacccactccctgccaggaagccccccaacaccccgagaccaagaatcatcagcttccaaatgttaacatgcacaagtagggaaaccgatgctaaaggattttaaggtcacagagctgggaaggggtggatcggggcctcaaacccctggctcccggccccccaggggccgagctgtggggatgtggatcccagactgaccccggcatggaaaaccaccagcgtggcccggcgccagacctgcttgtctgtcgcttgtctgcgagaggccaggaaatggctgggagagggagagacggttaaacgaaaaaacatcccaagaatgcacatggctcgtctccggccctggcagcccgccccgccggtgcctgcagcagagggtcccgtgatttggggctccgcctcagcatctgcgggatgggtgcccccggccgggcaggtccagacgccaaggtctgcacaggggtcacccggacacacctgactcggaccatgtggctaagtttgttttgaaatttcactgccccagcgtaacccagagtccaggccacgcccagcacggctggctcccgtccgggtctctgtgtcctgcagctcagggtggccagggcgggcgggcaggagggcaggcacctggcacccacccagacctgcgccctggccatcaggctgccccgggaagccgggcgaccgggaagatagcagagtcaacagggcgggtgcaggaaagggcgctccccatgcgagcctctgaagccctcggcacacagccctggaggctgggaatccttgagcgttttcctctgaggtctccaagtgtttatggtaacaagaggagggaggagggcgaggggacggccgccgctgggcagcagctccgcctgctggtcaccttcctcggggacatgcaaggacaagctgccgacggaaggggctttggcagaaatgcggggagcaggggacgcacccccacggacaggggcttttctggttgccaaacgtgcagacgacgggcctgacatccccatttcccaggaactctgtggatgggtgtcctggggctgccgtaagaaagtgccacaaatgggggactgggagggggtcttaaaaccacagacatggatcctctcccagttctggaggccagaagtccaaaatcatggggtctgcaagcctgtgctccctccagaggttccaggggagaacgctttctgcctcctccagttctgggggcgcaggtgtctctcagcttgtgtcctcctcggacacctggccagaatccactaggactttaaaaaaaaccattgcacccccccagtgccatcccagaggacccactcaataaacactggagcaactcccagggcaggggaatgcaggtgtgcccaggggtcagggcccatacacgcagctgagtgagccctgccaaccctaccagtcccagtcctggcccccgacattggtcccggcctggcctgctcaccccttcatgcctctctgtctaaggggcagggataggacgcagccctgctgctctctgtctggttctattttttttttttttttttttttgaggctgagtctcactctgttgcccaggctggagtgcagtggtgtgatctcggctcactgcaacctccgcctcctggtttcaagagattctcctgccttggcctcccaagtagctgggactacaggtgcactccaccatgtccggctaatttttgtatttttagtagagacgaggttttgccatgttagccaggctggtctcgaactcctgacctcaggggatccacctgccttgacctcccaaagtgctgggattgcaggcatgaaccaccgtgcccagctctgtgcctggttctgttttattttattttagagacaaggtcttgctgttacccaggctggagtgcagtggtgcaatcacagctcactgcagcctcaaactcttggcctcaagggatcgtccccactcagcctcccaagtagctgggactacaggtgccaccaagcccagttaatttttacatttttttttttgagacagagtcttagtctgtctcccaggctggagtgcagtggtgcaatcacggctcactgcaacctccccctcccaggttcaagcgattctcctgcctcagcctcccgagtagctgggattacaggtgtgcaccaccacgcccggctaatttttgtatttttagtagagacagggtttcaccatgttggccaggatggtcttgaactcccgatcctagatgctccacccgcctcagcctcccagagtgttgggattacaggcgtgggccactgcgcccggcctctgcctggttgttgaggcagagactggtgtcttcttccctcgtcttcccctcatatcaggcctcaagaaagacttccatgaacgctgtgggaaaatgcactatgatgtccctcactagaagtgccttcgccgcaggcccagcctgaaagtgattaatctctgcttcctcctctcccctcccccaacagagtttgtctaaaagtgcccagaggcctgggtgacagactgatggggggggccgcgggggtggaggggtgatgggggtgggggggtggggggcggagggtgtctctcgggtggcctggagcaccagcagtcaattccttcacttgcaaattgcccaggaggggtcagcagagatactgagttcccaaaccacaggggggtgagaacaggtctgaggctgtggggtgggatgtgggggccccctccctggtccctggtgttgtttaccaaacacagcagcaaagctgtgtctgcagccaggacgcctgcagccaagctcctggctgcactcccaatgcccacttctgcacgtgttttcaccccaccctgcagggatgggacacctccccttcttgagggtgaggacactgtgacatgttcctcaacaagatgcctggccaggccccattcactctgcatcacccaacaggtgttgaaacaacgcatgaaccgtgttatggtctaaggtgtaggctctactcaagataggcacaactttgtggaataaaatatcaaggtttcacaaggtgacaagtggccagttgctcaatttgtgttagagaaacagagaatgtctgggaggggacagggaggtgagaacattttgtggagggtttggcatgcagcctgtgccctataaccctcactttaagccagggtgccagcatcatcctatgtcacctaccacccatctcttgaagtcatcaccaaagtgaaaaagcaaaatggaaatactttgccaaagggacgagagacaaaaagttgaggtccttaatatataaagatctccaaaaaatcaataaaagtgaacaaaccagcttaataaatgtgggatcctggatcagatcatggaacacaaaagcacgtggaaatggaaaaaaggatgaaatttgaatcagccctatacttaatattgcagcaaggttgatttttttagtggtgataaatgttctgtagttatggaagatatcagccaatgggaagctggatgaaaggtgtaagggaacactctgtactatttttgcacctcttctataattcacatattatctcaaaatgtaaaaaataaaattgttaaaagtgaacataatccacaaaaagcattataaatgttcattatgaaaactttcaagctctccagtaataaaaaagattatagatcatacaatgagctgttacttttagcctttaaatgacaatttttttttttgagacagggtcttgctctgttgcccaggctggagtgtagtggtacaattgtgcctcactgcagcttggacttcctgggctcaagagatccacctagctccaccttccaagtagctgggactacaggtgcatgccaccatggctggctaattgttaattttttttttttttttttttttttttttttgagacagagtctcgctctgtcacccaggctggagtgcagtaacttgatcttggctcactgcaacctccacctaccacgttcaagcgattctcctgcctcagcttcccgagtagctaggactgcaggtgcaagccaccatgcccagctattttttgtatttttagtagagatggggtttcaccatgttggccaggatggtctcgatctcttgacctcaggtgatctgcccacctcagcctcccaaagtgctgggattataggcgtgagccactgtgcccagccaaattgttaaatatttttgtagagatggggtcttgctatgttgcccaggttggtctcaaactcttgggcttaagcaatcctcctgcctcagcctcccaaagtaatgagattacaggcatgagccactacacctggtctaactggcaagtattttttttttaaatagataatatccagggatggtcaagttgtgataaatcatggactagcagacagtgggtggaggacattggaataactgttcttgaaagcaaatctccctctggaaaactgtcctaaggatatttttctttaaacctttgtgtgttttctgaaaaaattttttagcaacaagccagtgttacttttgtaaacataaagttgtactattttgatgattaaaaatggacctctcaccccctttgtagactgtggaacccgggctggctcagcacagtcttgcagccgtcttcatggggtgaggttggggaggaccaagagctctcaccttcgactgccccaccctccagctttgcccgccccagcccaagctgtgtggcaagaccccttgttggtgcaggtgctgggggctggtggctgctggcattcccaccttctagagtgactttcacacttcctgatgagtttcccattccgctcagcaggcccataaataggattgtgcagaggtgcatatgcaagcactttacctgaagaattattatggataaaagtaaagaaataataaacaacttagatgcctcccttgagcccaagagtcccaggctacagtgagccctgatggtggcactgcactcctatttaatttaggagattagttcagtaatctgtggtacaaccaaaagataaaacacttaacattcactaaaaaggatgtcgcaaatccatatttgataatgtggaaagattcccataatatattgctaaattaaaaaaaacagattaaagaacagtatcaatagtgtgattctatgattattcagaaaagtccatacatgtgtgggtgtggtgcatattttttaacagtacatgtttggaagaactaaaagtcaccaggatgggttggagaagaggttggctccaggactgaggcagaaaaaaatattatatttctggagcatctttttgggccagaaagtaaggaaactcaaagaattatggcaacgtatcagaaggacacagagccagcttggctgggtgccagtggttcatgcctataatcctaccacttcgggaggctgaggtgggaggatggtttaaggtcaggagctcaagaccagccagggcaacatagggagaccctatctccgcaaagaattaaaaaaaaaaaaaaaaagcgatggcacgtgactgtagttccagctacttgggagactgaggtgggaggattgctagagcccagaagtttgaggctgcagtgagctgtgattgcatcactgtactccagcctaggtgacaggcaagaccttgtctcaaaaaataaaaaaattagccaggcatggtgatgtgtcccagctacttgggaggctgaggagggaggatcacttgagcccaagaggtcaaggctgcagtgaggcatgattgcaacactgcactccagcctgggcgacagggcagaccctgccttaaaaagagagagagagggaaggaaggaggaaggaaggaaggaaggagggagggagggagggaaggaaggaaagaaggaaggaaggagggagggagggatagagggagggagggaagtaaggaaggaaggaaagaaggaaggaaggagggagggacggatggagggagggagggatggagggagggagggaaagaaggaaggaaagaaggaaggagggagggagggacggagggagggagggaaggaaggaaagaaggaaggaaggagggagggagggagggagggatagagggagggagggagggaaggaaggaaggaaagaaggaaggaaggaaggagggagggagggagggaaggaaggaaagaaggaaggagggagggagggatggagggagggagggaaggaaggaaggaaagaaggaaggagggagggagggacggagggagggagggaaggaaggaaggaaggagggagggagggatggagggagggaagaaaagaaggaaggaaggaaggaaagaaggtaggaatgaaggaaggaagggccttgttcttagaaaatatccaccaagatctttagggttaatggggcatgatgtctccaacttaatttcaaatgactggaaataaattaatatgcatacatgcacaattacatacatataattctgtgtatacataactgcataataatatatctagcatatatgccatataagtaactatctttctgcgtatatatagatatatacatacatatccacctgcaatttatacataaatacatagacacacataaatgtgtatacacacacacggtgaacgatggagtgagagaataataaaagaaaaaatagggcaaggcaagtgtaaacagttggcatatttgagtataaagagtatacgaagtgcctgcggctattcttgcaacttctccgtaagttcaaaagtatattgaaaacagccagttagaaacaggcagcctggaagagattttaacagtcttcatctccagattgggattaccaggggaacttttccttttaaaaacaaaatggagacatcattcatataccataaaattcaccctcataaagtgtaaaattcagtaattttttttttgagacagaggcttgccctgtttcccaggctggagtgcagtggcgcgatctcggctcactgtaacctccgcctcccgggttcacgccattctcctgcctcagcctcccgagtagctgggattacaggcacccgccaccacgcccggctatttttttgtatttttagtagagacggggtttcaccatgttggccaggatggtctcactctcttgacctcgtgatccacccgcctcggcctcccaaagtgctgggattacaggcgtgaaccgccgtgccccggccaaaatgtattgatttttcagtatccctttttctttaaatctttgtgagttttctgaaatattttttcagcaacaagccagtgttacttttgtaaacataaagttgtacgattttgatgatgaaaaacggaactctcaccccctttgtagacttgtggaaccggggctggctcagcacagtcttgcagccgtcttgatggggtgagatcggggaggatcaagagctcccaccttccactgccccaccctccagctttgcccgccccagcccaagctgtgtggcaagaccccttgttggtgcaggtgctgggggctggtggctgctggcattcccaccttctagagtgactttcacactccctgatgagtttcccattccgctcagcaggcccataaattcaaagcgagggccgcaaatggggaatctgggatggcgcgtctggcttggggggctgggagccagcgggcccagacaagctgctggtgacctcggtcccccaagagctcagctgaggctgaaagggaaggatggggagggaaggacactcacacactctggaaatgagggcaaatcccagccctgacatttgacagccaagggctcaaatgaaaaagaaggtagaatttacacacacgcacgcaagcatccctcaatgggaactcacagtgaatatcgtgtgtagatccagtagaatgtcaccttggccgggtgcagtggctcacgcctgtaatcccagcactttgggaggctgaggtgggcggattatttgaggtcaggagtttgaaaccagcctggccaaaatggtgaaaccctgtctctactaaaaatacaaaaattagccgggtgtggtgtcacgtgcctgtagtcccagctactcgggaggctgaggcaggagaatcgcttgagccggggaggcagaggttgcagtgagcagagattgtgccaccgcactccagcctgggtgacagagcgggactccatctcaaaaaaaaaaaaaaaaaaaaaaaaagaatgtcaccttgaaatcataatgacagtggagaatcctggcatccactaccacgcaacaccacatccggctaatttttggccccagacgtcacccgatgtcccccaggggctaggatcagccgcaggttaggacccctgggttggaggtttcaccacggagagttgcggcggcaagaagacaccaggaggaagtgacctgcacacaatcaccagatcgtccctgagcatctggctctagggtctctgcctggaccgaagcattcccaggtgcagacccaggggtctctcctgtccctccgacctcacctgcgtaccctgcgttgcttcctctgccggggaagctcacccacgttctcaggtcctgggcggaagggcagagggctccccgggcacaatgtcttctgatgagaatcacagctgctgagatgcaactgcaaggggctgggaaagttcctgggacccaaaggagctgtgagatctagcgcctgggatggcagaggctctggccggtgaggacaacagccggcgtcagctcgggggtcggtacgcaggcggccaccttgtaacggccacaaacgggcttcaaaggggaggcaggcctgggctgctgagtcacccgggcctcatgcagttcacaaaaagctgtaactcgaggcagcatcacaccgaccgtggaagcatggaagggagggggacgctgtctcagcctccaggagctacctggcaggctgaggcaggagaatcacttgaacctgggaggcagaggttgcggtgagccaagatcgtgccactgcactccagcctgggcgacacagcaagactctcatctcaagaaaagagagagaaagagagaaggaaggaaggaaggaaggaaggaaggaaagaaaagaaaagaaggagagagagagagaaggaaggaaggaaagaaaagaaaaagaaagaaagaacaggaacaagataagggtggccactctcactgtttctattcagtattgttattgcaaattcaagccagggcaactgggcatgaaaaggaaatgaaaagcatccagattggagcaagagaagaaaaaccatctctctatttgcaaacggcctgttgtggtgtaaaaggtccccgggtacaatttgtgcagcagaaatacggcacttcacaggctgcttagaaacctagcaagtcccttgagcacaaactattttcctaagcttggtgggggcgtgagagggtggccggggactggtgacaatgttgtttgtgcactgggagagtccggctgaattgcaactggcctttacatcctaatcagctccctgaggacaacccgaaagacatcagattaaaaagtcacaatgagataaaccagcacgacgcggctctctgcaaagcgacaggtagtaaacagaccttaacgcacgtcatgaggtttgtttttcttttaaaagtcaacagctggtgaatcgcacagggccgggcagggcggtcaaagggcccgttcccccggctgggaaaaaagcaggagcccagggcggcggcagctggacgcgggccccgtggaactttctcccgtcagtcaggggccgtatttcttagccatcctcctctgaccttcatttcaaaccgcctgctgacgcatctaaccttggcccgttccgtgggaactccagactcagggtgaccaaccccagctgggttacccagggttgtcctggttggagtggctccaagtcctcagacccagcaaacccaggcttgctgatcacaccgcagaccccaccaggtggtcatctttctggggaaactggcttcttttcctccccgactcccttgctttgtcttcgtggtggcacctctcttcccaggtgctcaggtgtgacatcagccgtcccttgctggccctggtgccagctgactcccaggtctcctttctcttctttaagatggagtctccctctgtgacccaggctggagtgtaatggcgcgatcttggctcaccacaacctcccccttccaggttcaagcgattctcctgcctcagcctcccaagtagctgggattacaggcatgagccaccacacctggctaattttgtatttttagtagagatggggtttctccaccttggtcaggctggtctcgaactcccaacctcaggtgatccgcctgcctcagcctcccaaagtgctgggattccaggcatgagccaccacgcccggccgtctctttcttctaagatggagtctccctccgtggcccaggctggagtgcagtggcgcgatatcagctcactgtaacctccgcctcctgggttcaagtgattctcctgcctcagcctcccaggtagctgggactacaggtgcacttttttttttttttttttttttttaaatagcagagatggtgttttgccatgttgaacaggctggtcttgaactcctgacctcaagtgatccgtccgccttggcctccctaagtgctgagatcacaggcatgagccaccatgcctggcctcccagatgtcatttcttgcagctctcggagtcttccacgtgtctctggatcttcctgtgtcattcccacctccgctgtttgactctggtcccctcctcccatgtcagatgatggcagcagtaaggaaatgatgccttgatttagctcttttaggccctgcgcgtagggggttgtactaagtccaggagcatttaaaacctcactgcatacgcactacaacgtggatgaactccgaaaaatcacactcagtgagagaagccagacaaaaggccacacagtgtgtgatcccattgacatgaaatgttcagaacaggccagtctcgctctgtcgcccaggctggagtacagtgacatgatctcagctcactgcaacctccacctcccgggttcaagcgattcttctacctcagcctcccgagtagcttgaattacagacatgcactgccgtactcagctaatttttgtatttttagtagagacagggtttcaccctgttggccaggctggtctcgaactcctgacctcaagtgatccacctgcctcggcctcccaaagtgctgggattagaggtgtgtgagtcactgtgcctggcctttatagcatataattttatctcaataaagctgttaggaaataaactataggtaacaacattatcaagaggttgggcctcttatccaggtggatttttcaaatgaatcagtttttaaaagtaccattaaaaaacaaaactataagaggtaaggcaaaaaatagaacaggtaaagaaaatgggtcagtcttccttttttctctatcgggcacataacaattttccatatcttatagataaaactgaggcttagaaatggtagaattgtgtgaattatatcttgataaagctgtcgtctatatctatgtctctatatctattcatccatccacccatccattcactcatctatccattcatccacccatctgttcatccatccatccatccatccatccatccacccacccatccacccacccaaccaaccatccatccatccgcccactcatccattcacccattcatccatccatccacccacccacccacccatccatccatctatccattcatccatccatccgtccacccacctatccattcacccattcattcatccatccacccatccattcatccatccatccatccacccattcatccatccatccatccatccatccacccacccatccacccacctaaccaaccaaccaaccatccatccatccacccaaccaaccatccacccatccgcccacccaaccaactatccatccatccactcatccatccacccacccatccattcacccatccatccatccacccatccatccatttatccatccattcatccatccatccaaccatccatttactcatccatccatccatccacatacatacatactagaaatggtagaattgcaactagaattcaatatttgcaaatcctggtgcaataaatattattcttactcattttaaaatgttaatatctactttatttttcaaagttgagcacgatataagtatgttgttccttggattcctgatgctctcagtaacctagcaactcagcacctcacagagaacaagaagaacctcttgcgcggtaggtttggcttgcaaacaagccgttccacgctggaaggctgtgtcaaccgatgatgtggaagaataatcatccctccttgctgtttcttatgagatttgtcaggcatactcctacttgccaatactatttgccaacatactactccgcctcctctctgtttcctctcttgtaagatggcaataatgcatgcaggatgatttccatccctttctttaaaccttttggtatttttaagattttctagtatgtcactgttttcgtaatttgaaaataaagggttttttttttttttttttttttaagggagagattataggggactgagtgtgtggccttgagtttgtctgtttccaaactccctattgaggctgttcaaccaaagaaccaaagttgggggaaagtctatcccaaggctccagcccaaaggaagctctcttctacaatgggtgtgttaggatggaggagagccacaaagccagtaaaaaggcacatagcaaactggaagaaaatagtaatatgtagcatatgtaacaaagtgttagtgcctgtcatatgtaaagagcacctacaaatcaataagaaaaactcaatagccaaatagaagatatacagaggtacttagtgcaaagatactaacaatcagaaaagaaaggaataggtgactgatctcactgatggccaaataaatgaatattataacaccaaagagacactaatttcacataactggctggcaaaacttttaaattcagttgataaccattatggcaaggctgtgggggaactggcattttcactcactgttgacaggagttcaagttgctataaactttgtggaaggttattcgtcaatgattaacagaattgtaaatgccactatcttctaaagctgcatttctgcttttaggaatttacctcctgagatatttagacaaggtcaaaagtgatgtataccatgatgtttctgctgcaacattatttggatgtaagaaaaactgtaaagatcagtagtgtgttcttcaagtcactctggcatatccatacacaagaacgcgctaactaaaaagaatgaagctcactgatcacactgacaaaaaatggcaaccaaaaacaactcttaacatttttcaaaaggctgaaaagtagagttgctacattaaaaaaaaattgctccttctatcacagcatttttatttctagcaatgtggcagaaaacatcactttaaatctctcctcctctaaaacccaagcaagactggatgaaagaaatgaacaaaggccaggtgcagtggctcatgcctgtaatcccagcactttgggagactgaggcaggaagatcgcttgagcccaggagttcatgaccagcctgggaaacatagcaagatcctatctctagaaaaaatttttaaaaagcatccaggtgtgctggtatgtgcccatggtcccagctactcaggacgttgaggcagaaggattgcttgagcccaggaggtcgaggctctagtgagctatgattgcatcgtttcactccagcctgggtgacagagcaacaaggagagggaaggaaggggaggggaggggagggggaggggaaggaaggaaggagagggagggagggaagagagaaagaaagaaagaaagagagagagagagagggagggagggagagagggagagaggcaggggagaggagaaggaaaaaaagaaagaagaaaacgaaggaaggaaggaaagaaggaaggaaggagagggagggaaggaaggaaggaaggacggaagaaagaaagaaagggagggagggagagagggacggagggaggggaaaggagaagggaaaaaaagaaagaagaaaaggaaggaaggaaagaaggaaggaaggaaggagagggagggaggaaaaaaaaagaaaagaaaatgcatactctttctaaccaacagctgaggtcacaaaaaagtaagaaaatccagcacagactaaaaacttcaaagaggacagggcaccgggtggtgagaagtggcctgtggccacccagattgaggggagaggcttctggtcttggtcaccaacggcctgatgttgttcttaatctctgcctctcttaaaaatgtatagtggaaaattccttttttaaaaaaaaaacttggaatgtttgtctttattttgtgctttatattttcaaagtgaaaagaaatagtattgagtcaatttttgttttttaaaatattcgttctatatatttacaagccttcaagctgctctaaagatttcaaaagtattaagagtaggactgggcgtggtggctcacacctgtaatcccagcactttgggaggctgaggtaggtggatcacctgaggtcagaagttcgagaccagcccgggcaacaaggcgaaacctcgtctctactaaaaatacaaaaattagccgggcatgggggcggctgcctgtagtcccagctactaggggtgctgaggcaggagaatcgcttgaacctgggacacggagcttgcagtgagccgagattgtgccactgcactcctgcctgggcaacagagtgagactccatctaaaaaaaaaaaaaaattgcaaatacttttcccggggtagcactttttttttttttttaaacaatccttggagttctgtggtccatgccatttccttctgtttcaatgttatatatgttttgattactattgtgatgttttaagttttctgaagcaagctgagaggcaggccgaaatatttgatgccaaaaaaaaaaaaaaactttcttacctcattcaccccaaaccttctcaaatctggattaaatactatactttaaaacaaacatgaggtgcttctgaaggggaggaaaatttatttctctgcttttctattatacaagttgtttacagaaactgcaaatcaaggccgggcacagtggctcacgcctgtaatcccagcgctttgggaggccaagacgggcggatcacctgagctcaggagttcgagaccagcctggccaacatggagaaaccccatctctactaaaaatacaaaacacttagctgggtgtggtggtgggcacctgtagtcccagctacttgggaggctgaggcaggagaatcgcttgaacctgggaggtagaggttgcagtgagccgagatatcacaccactgcactccagcctaggcgacagagtgagactccctcaagaaagaaagaaagaaggaaagaaagaaggagggaaggaaggaaggaaggaaggaaggaaggaaggaaggaaggaggaagaaagaaactgcaaatttaaaaaattacatatagtggaaaatttcaaacacagcctgaagcacgcaggccaggacgaggtctctctgagtgtcgtcacctcctgcaacgggaattaacattctgcccttcttctgttctcacttctctctccagctttgcacgggtatttcacacaaattcaagacatcatatgactttgcctgtagaaccttcagaatgttctctaatcactgaagctttctgatttcccaacacagaaccacccaatcaaattaacactgtcttattatcaacttgctccatgattatcaacaataatttcctgttaccaataaccagcctgtgacccattgtccatgattatctcaaaaatgtctttaatggcccggcgtggtggctcacgtctgtaatcccagccctttgggaggctgaggcgagctgattgcttcaggacaggagtttgagaccagcctgggcaacataccaagacctcatctctacaaaaaatacaaaaaaattagctgggcatggtggcacgtacctgtagtcccagctatttgaaaggatgaggtgggaggatcgcttgagcccaggtggtcaaggttgcagtgaaccatgatggcaccactgcactccagcctgggcaacagagcgagaccctgtctcaaaagaaattaaatttttttttttttgagacggagtctcactctgttgcccaggctggagtgcagtggcgtgatcttggctcactgcaacctccacctcccgggttcaagcgattctcctgcctcagcctcccaagtagctggcattacaggcgcccgccaccacgtccggctaatttttgtatttttagtagagacggggttttgccatgttggtcaggccggtcttgaactcctgacctcagttgattgatccacacacctcagcctcccaaagtgctgggattataggtgtgagccaccatgcccggctgaaaggaaattaaatttaagggccgagtgcagtggctcatgcctgtaatcccagcactttgggaggccgaggcgggtggattgcctgagctcaggagtttgagaccagcctgggcaacatagcaaaactccgtctctagtaaaaatacaaaaaattagccgggcgtggtggcgggtgcctgtaatcccagctactcgggaggctgaggcaggagaatggcgtgaacccgggaggcggagcttgcagcgagccaagatcgcaccactgcactccagcctgggcaacagagtgagactctgtctcaaaaaaaaaaaaaaagaaattaaatttaaaaaggtaaaaagcagctcaggaccgccaatgtacaatgcactccatatggctgtacgtatctatgtgagtgtgcatgtgtaggaaaagtctagggagtttcagtggttagacgacaatgaccaggacaactgtgtgagcagcacctgtgtggcactgagtcatctcaggctctccactcggctctgtccatcaacgaccgaatccagctctcacggcgactctacgctgcatgcttgttactctactacagaggaggaagcaacgcttacgaaaaccaaggaccagaagaactcacaatcaaaactagtgggcggccgggcgcggtggctcatatctgtaatctcagcactttgagaggccgaggcgggcggatcacctgaggtcaggagtttgggaccagcatggccaacatggtgaaaccccatctctactgaaaatacaaaaattagccgggtgcggtggtgcatgcctgtaatcccagctacttgggaggctgagacaggagaatcgcttgaacccaggaggtggaggttgcagtgagctgagatcgtgcctctgcactgcagcctgggcgacagagtgagagtcggtccctaaaattaaaataaaaaatagtaggcaggcccagcgcggggctcacacctgcaatcccagcactttgaaaggctgaggcaggaaaatcacttgagcccaggagtttcagaccagcctgggtaacatagtgagaccccgtctcaattaaaattaaaaaaaaattaagcaggtgtagtgatatccacctgtggtcccagctactcaggaggttgaggtgggaggatcgcttgagtccaagaggttgaggctgtagtgagccatgattatgccactgcactccagcctgggtgacaaagtgagaccctgtcccccccccaaaaaaaaaagtgggcaaatatcgacccagttgttctcctttcacgttctgcactgatgatcagttcccatccaccccacactgttaacagtggttaattctggggagtgagatttgtgatgaagatgtctccattctcactcctgcagtacgagacttctttacaaatatattctcaacagggtgaacatcaattcttggggagatgaaaacaaattttactttttttatggattaagcccagaaaacagaacataaacagatacacagtctatctatgatattgaaatttcacaggtataggctgggctcggtggctcacacctgcaatcccagcacttttggaggctgaggtgggaagatcacttgaggccaggagttcaagatcatcctggacaacatagcaagacccaatctctagaaagaataaaaatttaaaaattatccaggcatggtggtgtgcacctgttatcccagctttggtgactgaggcgggaggattgcttgagcctgggagttggaagctgctgcagggagctgagatggcgttactgcactccagcttgagtgacagagaaagaagatcctgtctctaagataaaaacaaacaaaaactccattatataataatgctacttggggccagtcacagtggctcacgcctgtaatcctaacactgtgggaggccgaggcaggcggatcacctaaggtcaggagtttgagaccagcctggccaacatggtgaaaccccgtgtctactaaaaatacaaaaattagctgggcgtggtggcgggcacctgtaatcttagctactcaggaggctgaggcaggagaatcgcttgaacccaggaggtggaggttgcagtgagccgagatcacgccactgcactccagcctgggtgacaagagcaaaactccttctcaaaaataataataataaggccgagtgtggtggctcacacctgtaatcccagcactttgggaggccgaggtgggtggatcacgaggtcagcagatcgagaccatcctggctaacacggtgaaaccccgtctctactaaaaatacaaaaaattagccaggcgtggtggcgggcgcctgtagtgccagctactcgggaggctgaggcaggagaatggcgtgaacccaggaggcagagcttgcagtgagccgagattgcgccactgcactccagcctgggcaacagagtgagactctgtttcaaaaaaaaaaaaaaaaaagaaattaaatttagaaaggtaaaaagcagctcaggactgccaatgtacaatgcgctccatattgctgtacgtatctatgtgagtgtgcatgtgtaggaaaagtctagggagtttcagtggttagacgacaatgaccaggacaactgtgtgagcagcacctgtgtggcactgagtcatctcaggctctccactcggctctgtccatcaacgaccgaatccagctctcacggcgactctacgctgcatgcttgttactctactacagaggaggaagcaacgcttacgaaaaccaaggaccaaaagaactcacaatcaaaactagtgggcggccgggcgcggtggctcatatctgttaatcccagcactttgggaggccaaggtgggcggatcacctgaggtcaggagttcgagaccagcctggccaacatggtgaaaccacatctctactgaaaatacagaattggccgggcgtggtggctcacgcctgtactcccagcactttgggaggccgaggcgggcggatcacgaggtcaggagatcgagaccatcctggctaacacggtgaaaccccatctctactaaaaatacaaaaaattagctgggtgtggtggcgggcgcctgtagtcccagctactcgggaggctgaggcaggagaatggtgtgaacccaggaggcagagcttgcagtgagctgagatcgcgccactgcactccagcctgagcgacagagcgagactccgtctcaaaaaaaatgaaaagtaataaaataataataataataataataataataataataataataataataatgctacttgggcatcttccgtcaaaagaatcagacatcgggtgcatttaaatctcttgccaccgttattctttctaaggagccactaggaaaaggatgtctcaaaagaaggtgatcacggaaaaagaaagcttatgaaacactgacttctgtaatcacgttttcagttgaaagaaatggaaactgatctaacttccagctcacctcaagctggaaagaagtctagtttctagaagcatctccaaaattggaaagtgaagtttctagcatacagttccaccgagggcccatgatgaagagggggagaggcgggcacgaggcgaagcgggtgccccgcgctcggctggaaaaagccaatgtcaccgggctgtgctatttgcttgtgggagggacgcctggggtgggggcgtgccgctggttgctccgccgcagacaccacgtggtgctttttgaactgatcagagccccagcctgcctgctttgctgtcccgggctgacctccgaaaacaccgcactttcccctcgctgacttggtagatgtctgtctgtctgcttgagtatctcgaagatctgaggtttccattccagcagaataaatactaggagggcccaccccttcctcctcccagccgaggctggatgaatccaaataaacccagctggtggggaagagcatttctaggacttcggcgggagaaagcaccgcccacccgggtgggtttccaggaggtggaggtgcggacctgggaggggggccctcgggcagccctgccatgcagccgcgtcactccgcctgcctgatgtcacaggagctgggggagtttgggtatttcatgaagctgttgagttattgtggctttggtttgtgacaccggcgttcaggcacggcctaaaggcaacatcaaagacggtgcatgaaaaccgggggttaggccgggcgcggtggctcacgcctgtaatcccagcactttgggagaccgaggcaggcggatcacctgcggtcaggagttcgagaccagcctgggcaatacggcgaaaccccgtctctactaaaaatacaaaaattagccgggggtggtggtgctggcctgtgatcccagctactcaggaggctgaggcaggagaatcgcttgagccctggaggtggaggttgcagagagctgagatggcgccaccgcactccagcctgggcaacagagcaagactccatctcaaaaaaaaaaaaaaattagattgtggtaatggttacacaactctggatattctaaaaaccactgaattgtacactttaaaaagtgaattctatggcatgtaaaaatctcaataaagctgtcatataaaataaatatatataaatatgatgccaaaatatatacataaatatggtaataaaaaattaaggcccttaaacagcttgtgtttatgtagattttagctatactcctgttacaagttaacataatcccattaaatatttttttaaaccatatattttatattaggaggatgacacgtttaagtgaaaagtaactatttttcaaaaaaaaaaaacattgaggggaaatagtggcattgttttacatttttgcaaatttctttcatgtctggcttaatagaagacagctggattcttgtataagcctctgagttcaatccactgtgatatcaaacgtcatgcaacctctgaaaactccaccatctgtgtgggagagactgggaggaaggagacccagagtatcttggcatttttttttttttttttttgtgagatggagtctcgctctgtcacccaggctggagtgcagtggcgcaatctcagctcacttcaacctccgcctcctgggttcaagtgattctcctgcctcagcctcccaagtagctgggattacaggcgccaccaccacacctggctaatttttttttttaatttttagtagagacagggtttcaccatgttggccaggctggtctcgaactcctgagctcaggtgatccacccaccttgacctctcaaagcgctgggattacaggtgtgagccacagtgcctggcttctatcttagcagttttgacctagtggtcccccaccaaaagggtctcagagaccaacccctgggtgtccctggaccacactttgagaactccaatacacaggtattctctctacttcacagaagagaaaatgcgatccaagatggtaataaacctgctcaagtcctcaaagctgaaaagtacggctgaaggagaataaaaaagagaaacataaagcagttgtggtggtgtgtgcctgtgctcccagctacttgggaggctgaagtggtaggatcgcttgagcccgggagtttgaggctgcagtgagctaggatcacgccactacactccagcctgggtgacaaggagagacctcccccccgccaccatctccaaaaacaaattattacttatgtaaaaaatagaactaaggaaggtttgcttgactccaaagctgtgttctttgcatccattctagttccatccagatggcccggggtacagctgggatgcctgttgtccctaaaaaccatggggcacaagtaggtaaaccctagagtaggtaactcctcaattcagctcaaccactatctgaccagcctccagttaccaggcagtgtgtttccccagccatgtggactcagtcctgccacggcgcggctcgtgcctattgcagatacatgtacatgcttgcaatatacgtgtctgtctcccctgctctacaatgagctccccaggaacaaggactgggcaattttttttggcttcctgtctccactgtttggcagcaggaaaagagaggtgcctgaagaaagggtaacagagcaatgcaatcccccgatgtcagatttttattgaggaaaagaaaggcagtgaaggccgggcatggtggctcacgtctgtaatcccaagcacgttgggaggccggggcaggaggatcccttgagcccaggagttcgagaccagcctgagcaacatggcgagaccctgtctttataaaaaaattagccgggcatggtggtgtgagcctgtagtcccagctactagggaggttgaagcgggaggctcacttaaggaggctgaggttgcagtgagttatgatttcatcactgcacttcagcctgggccacagagtaagaccctgtctcagaaagaagaaaagagaagacaggggaggggaggggaggagaggagaggggaggagagcagtggaatcccagatgatccttccagaatctgcaagcagcactgtggaggcaccctggggaagaaagtctgctaggatctggagaagcactagaagccgggcacagtggctcacgcctgtaatcccagcactctgggaggccgagatgggcaggtcacctgaggtcaggagttcgagaccagcctggccaacatggtgaaaccccgtctctactaaaaatgcaaaaattagccgggcgtggtggtgcacgcctgtaatctcagctacttgggaggctgagacaggaggattgcttgaacccgggaggcagaggttgcagtgagctgagatcgcgccactgcactccagcctgggcgacagagcgagactccgtctcaaaacaacaacagaaaaagcagcactgaggactgggctgcgggctgcgtcctctgcaggccctggctcccctgtacccaccccctcctgcacgcttttaagcagatccagcactcccttcagggcgctggggaggagctgccagcagacaggaatgcgctgtgcagaagcagcaggttctgccagctcctcccgagcctgcagggaaatgcaggcagatctgtggcctcgcacaggcggacagacgggcagcagggatctccaaccgggccccggagcacgaaccactacgcaatcgtcacagcatgtgctaccttccgtggtgttctgggaatctaaatcaatcccatacgctggacagcaagccagaaacggaagccaatctcgggctgggcagagggccacccggccctcccctcaccaccacccctcccttttccttcaatcagaattgccttttataggcaggttgatagttcacagctggaagggggctcactgcggctctgcaaggaaagatgcgctacccacccttttctctctttctctttctttttctctttttctttctttctttctttctttctttttgtttcttcctttcttcctttctttcttttctttctctttctttctttctctctctctttccttccttcctttcttttctttctccctttcctttccccttccttccttccctttctttctttctttttctcttttctgttctgttctgttcttttttttgatggagtttcgctcttgttgcccaggctggagcacaatagcacagtcttgcctcactgaaacctccgcctcccgggttcaagcgatcctcctgcctcagcctcccgagtagctgggattacaggtgcgcaccaccatgcctggctaatttttgtatttttagtagagacggggtttcaccgtgttagccagggtgatctcgatctcctgacctcgtgatccacccgcctcggcctcccaaagtgctaggattacaggcgtgagccgccgtgcccggcctaaagctgtgttctttctgttccacaggctgcagagagggagctgatgccagaatgagggggaacccccggagcttctcgcatcgggtgggaccggcatccggtgagaccgcggtggctctctggggctgaaaattccaagcagagtagcccgaggaatccagccatccccgagggttcagaaatgcaaatcagggctgtgtattcacagcctggactggagatcgaccaaaaactatgcagggctcacccttgcggggcggcggctaaatttaggaaaccaaccatctggagaatgcaggcatcagaagcccctgcagctaggaggatcatttcagttcatttttattcactgttcatagatctcccagtttttcctagcgtgttcaagctggaaaggatttcagagattgtgtcacctagatttattttacagaaggaggaactaagcgtttaagggagaagtgcctgttcttttattattattattattattttattttttgagacagagtctcgctctgtcacccaggctggagtgcagtggtgcaatctcggctcactgcaagctctgcctcctgggttcacgccattctcctgcctcagcctcctgagtagctgggactacaggcgcccgccaccacgccccgctaattttttgtatttttagtagagacggggtttcactgtgttagccaggatggtatcgatctcttgacctcgtgatccacccgcctcggccccccaaagtgctaggattacaggcgtgagccaccgtgccgggtctcgagaagtgcctgttttaacacactgaaaagtggtcttagccaggtgcagcataatatgcccgtctcccagcactttgggaggccgaggcaggaggatcgcttgaggccaggagtttgagaccagcctgggcaacatagcaagaccccatcactacaaaaaataaaaataaattagccggatgtggtggcgtgtgcttgtggtcccagctactctggaggctgaagcaggaggatggcttgaaccaggaagtcgaggctgcagtgagctaggactgcgccactgcactccagcctgggcaacggagcaagaccctgcttcaaaaaaaaaaaaaaatgaatgaaaggaaggaaggaaggaagcgagggagggagggagggagggagcgagggagggaaggaaggaaggaagcgagggacagagggaggaaaaagagaaagttttctgccctagacactccagcctgggcaacggagcaagaccctccttcaaaaaaaaaaaaaaaaagaatgaatggaaggaaggaaggaagggagggagtggggagggagggagggaaaagagaaagttttctgccctattatgtgattttcacaccaccccaagttcaagaacaaagtgtggtttgtttgaatgcttttcccagacagagatgcagggcagtggcgagaaggaaacaatccagtggcggcttcccctctcttagaagtattaggcccaagaaaccacctgaaatcctgggatgaactagattctgtcgttggagtccaagtccttttggctgtcagtatgagtggcttgaagccgctataacaagtcacacggatctggtggcttaaaacaatggaaatggattctctatggctctggaggtcagaaatctagatgtgggcaaggccgtgctccctctggaggctccaggggaggatccttcctgcctcctccagcttctggggcctccaggcatcctctggcttgagcccacatggctccagtctctgcctccatctccccatgcctttcctcatgtgtcaaatctcactgttgttttttttgtttgttttttgagacaaggtctctctctgttgcccaggttggagtgcaccagacaccatctcggctcactgcaacctccgcctcctgggttcaagtgattctcctgcctcagcctcctgagtagctgggactacaggcacctgccaccatgcccagctaatttttgtattattagtagagacggggtttcaccatgttggccaaacaggtctcaaacttgtggcctcaagtgatcctcctgcctcagcctcccaaagtgctgggattacaggtgtgagccaccacacctggccaaatctcacttttttttttttttttttttttttgaggcagagtcttgctttgttgcccaggctggagtgcagtggcttgatcttggcttactgcaacctctgcctcctcagctgaagtgattctcctgcctcagcctcccgagtagctgggattacaggcatgcgccaccacacccagctaatttttgtatttttagtagagacggggtttcaccatgttggccagcatggtctcgatctcctgacctcgtgatctgcccgccttggcctcccaaagtgctgggatgacaggtgtgagccaccgcagcctgccaaaatctcactcttataaggacatttgtaattgtttagggtccacctggagaacccaggataatctgccgtctgaagatccttcatgtgatcacttctgcgacctctttgtcctataagggaaaattcacaggttccagacatttaggagccaatatctttgggggcattactcacacgacatacaaagtctcttttcagggcaaacatagatgctcacaggaaatgcctccatgccccgcagtcgggcaagcttccaagcaagcaagccgcttttaagagtcaggaagaggctgggtggctcacgcccgtaatcccagcactgtgggaggccgaggtgggtggattgcttgagcccaggagtttgagaccagcctgggcaacatagtgagatcccatctctacaaaaaatacaaaaattagctgggcgtggtggtgtgcacctgtagtccttggggggctgaggtgggaggatcacttgagcccaggagttggaggctacagtgagccgagattgcaccactgcactccaacctgcgtgacaaagttagactctgtttctggccaggtgcagtggctcatgcctgtaatcccagcactttgggaaactgaggtgggcagatcacctgaggtcaggagttcgagaccagcctgaccaacatggagaaaccccatctctactaaaaatacaaaaattagctgggtgtggtggtgcacgcctgtaatcccagctattcaggaggctgaggcagcagaatcgcttgaacccgggaggtggaggttgcggtgagccaagattgtgccactgcactccagcctgggcaacaagagtgaaactctgtctcaaaaaaaaataattaattaattaattaattaattaatttaaaaaaaaagttagaccctgtctcaaaaataaaaagtcaggatgagagaaggcagccaaggcaaggaagaccaataacatgctcggatggtgcagtctctttggaacattccaaaactaaactgagaaggttcccattctcggtgatgacaagtttctggaactagatagatagtgctggtgtttgcacgcagtgttcatggaaataatgccatggagttgcaaacttttgaacagtaaacaagggccgggcaccgtggctcatgcctgtaatcccagcacctcaggaggccgaggcggggggatcatttgagcccaggattttgagaccagcctgggcaacacagcgagaccctgtctccacgaaaaatttaaaaattagctgggcatggtggtgtgtgtctgtagtcccagctactcaagaggctgaggtgggaggatcacttgagcccaggaggttgaggctgcagtgagctgtgatcgcaccactgcactccagcctgggcgacagagcaagaccctgtgtcaaaaaaaaaaaagaaggccaggtgtggtggctcacacctgtaatcccagcactttgggaggtcgaggcaggcagatcatctgaggtcgggagttcaagaccagcctggccaacatggagaaaccctaacatttttagtttctactaaaaattcaaaaaattagccgagcatgatggcaggcgcctgttatcccagctacttgggaggctgaggcaggagaattgcttgaacctgggaggcagaggttgcagtgagccgagatcgcaccattgcactccagcctgggcgacaagagtgaaactccatctcaaaaagaaaaaaaaaaagaaagactaaaatggtaaaaaaaaaaaaaaaaagaaagaaagaaaagaaaaaagaaaaagaaatacatattaggatggggcaagctaaactacattgttatgtattttaacaacacataaaacccacttggggccagtctgcaagtacctcccatgtaggctcagcctggcacttgaaccccgtgccctccgccccccgcccctcccagtggcgtctccgcttctcacttcagaggcagagctgtcatcgtgggcactgggaagtagcctgcagtgtcagcacagaccggcgctcaccaacgacacggcacggaggctttctagggagcagtccccccaggacagcaatacgttcaggcgacagcgacacagggcagcaacagcggttccctcctggcaggcagccagacgcacacacgcacgcagaccacaccatccagaaagttcacctgcgacctgagacgcagctctttgagggagatcagaagatcagatggtatttgagaaaaaaaaaaaaaaaaaggttaagccaagtcagtgggaaggtggaggaaaaaaaaaataaataaaggttaggctgaggtcgccgccctgccactcatgacacagagcgtggcacgtcggtttcacacctaaaagtcagaacgattcacaggtggcgaagcgtgggtggaggaaaagagcggggatgtctgaggagcagaaagaccgaaacgcaagagtaatacctgctgcggagaggttccgcccacgtgggatttgcccctgggaaaaaaaaaaaaagtccccgaagcccctgcaaggcaaggcctgcgggctggagggacgggctcttcacacacacgggaggacagagatcgtctctggaggtgggcgccccagcaggcacactgacggcctcggtgcagctcccctgcacccccaaatgacgcaggtcagtaatccagggacgggcagcaggctcacgtgtccccagatgcaggcacacctgtgcctctcgagtcatctgcagagtcacgagaccagcaacctggaaacctggaggagctcccctggctgccaccggacaccccagggcaaggggccgggtgcctcccgggcaaccccctctctctgcagcaggggatgcagatggcagagtctcaaaggccttccctgcatggggcagacacggaggacacactctcccggggtctgcactgaggctgtcagggggcctgctgcgttccccactccaggtaaccctgtctgctggcactgagggcctcatcagacccctgcaggcctgcaaccacagccaaaatcagtgtgccttctccaaagccaccttctgacccgctttttaaagaaactgaggtaaggtttgcataatgtaaaattaagcattttaaagtgaacaattcagtggcattcaacacattcacaacgttgtacaaacatcatgcctacctagttcttgtacattctctctctctctctctctctctttttttgttttgagacagggtctcactccatcttccaggctggagtgcagtggtgcgatcttggctcaccgcaacctctgcctctcaggttcaagcaatcctcctgccttagcctcccgagtagctgggattacaggcatgcaccaccacacctggctaatttttaatttttcgtagagatgggggtctcactatgttgccaaggctggtcttgaactcctagcctcatgatcctcccacctcagtgtcctgtggagctgggactacaggcacgtaccaccccacccagctaatttttgttttacactaaagtgttatttcatcttggtcgctgaggttttttagcgcccccttcaattttgtgcccagtgtgaatacattgcttgcctgaccctggtcctgccctgggatttgggagccgacaggtccgggtaacaactgcagtttagccgctcacttgctggaggacctcaggctctcttccgtgagccttattttggccattgctggaatcccgttgtgcaggacagctgggtggattgcagtgatgtttgcgcaccacgtcccgagtgccagagcagacagggtcccacctgttaccgtcttggacttccagcctccagaaccaagagagagaagaaatctctgttgctaaagccctcctccagtctgtggcttgaggttacagagccccagcaaaccatcacgctgggttaaaggaactggtccccagagctcacagctgcagactggccaccgtaggacaatccagtgggacctgggggtgcctctgggccattgggggaccctcggtgagccagtgaactcagtgcacttctggagctccctgaccacgagtgaggaaattgaacggtacaggaaaagcaggagagcgtgcaccttaaacggccaaggtccgtcactaccaccgagcacctgccaggctccccacccagtgctcccaaaagtagagggccccctccctcccctaaactctcagaggttagtatcaccgggtcaagatgatgacagcacggggaagcctctggcaagggccttgccccaggggacagctcaggtggcctcggataacatgacaaagaccttctttatttattattattattaattttttattttttttggagacagggtctcaccctgtcgcccagactggagtgcagtggtgcaatcatggctcactgcagcctcagcctcctggactcaagcaatactcctgcctcagcctcccgagcagcttggactataggtgtgcactgccacacctggcttttttttttttaatttttatttatttattattacttttttaagacagagtcttgctctgtcgcccaggctggagtgtagtggtgtgatcctgggtcattgcaacctctgcctcctgggttcaagcgattctcctgcctcagcctcctgagtagctgggattacaggcaactgccaccacgctcagctaatttttgtgttttcagtagagacggggtttcaccatgttggccaggctgatctcaaactcctgacctcaggtgatccacccgcctcgcaaagtggtgggattacaggcatgagctatcacgcccggccactaatttttttattttttagtagagacggggtcttgctgtcttgtccaggctggtctcaaactcctgggcttaagcgatcctcccgcctcagcctcccaaagtgctgggattgcaggcacaagagaccctcttttattgttgcaagatgctgacaggtttcagaagaggtttgaaccaaagcggcctcagggacccaggtggcccctgggatacgtttctcccaggccaggtttggtttcagtcggcctgagcgtgcagacacctgtctcctgggcactaaacttgacactttcagttcctatcaggcggtggggacgagggggcgggtgggagggggggaacgggctcacgtgccaggctcggggggggggaagcgtcctcaacattctcagaaaggaccacgcccggcaccggccttggatggcttccctctcgcaatctgctttctgggaagtgggcccctcgcaccgggtgcggcgcccagggttccccgccaccccgacccttactaagccgctcagcccagggatccagggccctggcgagacagcctgggagacgcagagtgggaaatgatgactgggagctggtatcgcgaatgtctacacgcagactgacttcaggggcgaggaattccgcctggcgagcgtctagactgcggtgtttctgggacgctgggagctggagccaggacaggtctcccgggagctggtctgtgctgccacctgctggtcatggcccgacaggcggcctcgctgtcaccactgagtgagctcgaggtgccccgtcccaggaccgtggcaggagggggtcccgtcctgcgtggggcttgaaggcaggtgggcaagacggtgcatagcccgaatctatttaatgatttatttgataataccatttaaaaatatctcttaggccgggtgcaatggctcacgcctgtaatcccagcacttggagaggccaaggtgggaggataacttgggctcagaaggtcgagaccagcctggccaagagagcaacaccaggtctctacaaaaaattaaaaattagccgggcatgctggcgggcgcctgtaatcccatctactcaggagaccgaggcaggagaatcgctcgaaccggggaggtggaggctgcactgagcgttgatcgcgccactgctctccagcctgggcgacagagggagattctgtctctaaaaaaataaaaagtaaaagtaaaagtaaataaaaataaaaatcttttttttttttgagatggagtctcgctctgtcaccaggctgaagtgcagtagtgtgatctcagctcactgcaacctccgcctcccgagtttaagcgattctcctgcttcagcctccccaagtagctggaactacaggcacccgccaccacgcccagctaattttagtatttttagtagagaccgggtttcaccatgttggccaggatggtctcgatctctcaacctcgtgatccgcctaccctggcctcccaaagtgctgggactacaggtgtgagccagcgcgcccggccaaatctttctttctttttaataattggattgactttggtctacggtctcccctggggccccatccttctctggggtggggccatcctgggcactgcagggtgctcagcagcatctctgacctccgcccactccatgccaggagcatcccagttgtgataaccacacgtccccaaacatcgcccagtgccccctggggggcagcatcacccacatttaaaaacagttccagggtagcagcctgcaaagaaggtgtgtctgggacctgggcatttcatatcggggtgacccagcctgggagaggggaggggcctcagtgagaagactgaagccaggaccccccccaggcaggacccaggctcccacggcacaaaagccccaggtccagggttcctggaaatgttttaaaatccagtcgacaaaagatgaataaaatacttgtgagtgtataatcatgaatccagcctggattctgtttgtctttatgccaagacaattgtaaaatacagcttagaatttttttttttttttgagaaattttttttttttttttgagagtcttgctgtgtcgcccaggcagcggtgcgatctcggctcgctgcaacttccacctcccagttcaagcaattctcctgcctgagcctcctgggtagctgggactacaggtacccaccaccacacccggctaattttgtatttttagtagagacgggttttcaccatgttggccaggatggtctcgaactcctgacctcaggtgatccgtccgcctcggcctcccaaagtgttgagattacagatgtgaacaacggtgcctggccaacgtcggacatttttagagcggaggaggtagcctaggagggcaaatgtgccccaggccctgagtgtcccaacatggccctgcagccaggtagaaccagccagggaaagggatggtgtttaagggacgtggaaaaggaattcagacaaagaatttctgatgcaagtttaacccggctggtggctgcagcctacttcctgctacaggctgcacagtctcttgctgaattagcacctacgttgaattaggtgagtttgcttgaactatacgttgaattaggtgttgaattaacacataggggggctttgggctctcagcccctcatctaaagtccattgtctcaagccactgcctcattggaagagcaggtgtctacactacctggagagggggagatcctgcattaattatttggggagaatgcaatctgtccccgctcctgctcacagtagatacaagaataaactcccgacggggcagatggcataaaccagggggacccccagctcctgggactcttcctcctctctccctccccactcagggtgtggatttcaatgtgtgcagcctcctgggacctcagtaggagagatggtcacggaatgcagagtctcttggggaatctgtggattcccctaacctgggcggggggtctcaatcaggggtgatcctgcccccaggggacactgggcaatgtctggggacatttgtggttgtcatgcctggaggtgctcccggcatggagtgggtggaggccaggacgccactcagcaccctgcagtgcccaggatggccagaccccagaggatctagccccagatgtccacagtacctagcaggagagatcctgatttaattaattggtgagggggaagatcaagggaccctggctatgccaagaaactcggactgcagcagtgtgtggatcctgaatgagaaaggtgcgaatcagacagaagctcgcagcctaaggccagcgaaggccacggccacagcgacatctaaaggccggcaagtgcaatgcagaatccacccagggaactcgggccccgcgcctacccccggggtaaagggggccagcctcgcacaggtgggtccgttgcaggcgtctgttgcgagaccacatcctcaccacccggtgaacggcactgggagcagactcaagaggctcgagaggtcccaggagggcgggaagagagttcccccagctacagcctgagcatggtcgccagaaagcaggtgcggcgactttccctagcaccctctccctgccctctgtgtacccgcaggggggccctgcacgtcgggtctcaggcacatgtgtggtgaaatgcacacaacaaaaaagctccctttccagacatccagtggcattcgtgcagccatcatctctagctagctctagaacattctcagccccccaaaaagacaccccatccctatcagctgtcacttcccatccccctccccagcccctggcacccacacatccccttcctgcctctctagactggcctgtcctggacatttcatagaaataggatgacacactgtgtggccttttggatctggcatctctcactgagtgtgacatcctcaaggggcatccaggctgcacgtggcctgggtcagagtctcgttcacggctgagtctcgttccagtgtgtggagggccacgctgtttatctatttacccacggacggacacttgggtcatttccaccttttagccattgtgaatcgtactgtatgaacatttgtggcaaggttctatttgaacacctgcttccaattcctctgggcagataactaggagcggaattgctgggtcatgtggcgactccgcgttcagccttttgaggaaccaccagactggtttccaaggcggctgccccatcttgcatcacacatcaattctcaatgccaaggcgttcctcagcttttaaacaaggcactgaggcaggaggcaggcagctgattgttgaaggtcaccccgtagccattggcagagccagaacttgcagctgtgatttgtgccgcggctcctgcccaagccctccttccctggcttcagtgctgggctgggcaaggtgtgtggaatagccccgctttctaggccactttcggggtactgggcggccactgtctggtctgaaggtgccatctgtgacactcttttttttttttttgagacggagtctcgctctgtcgcccaggctggagtgcagtggcgcgatctcggctcactgcaaactccacctcccaggttcccaccattcaggctcccccagacctccgcctccagggagccctccagaatgtccttcctcctgccttcaatgctcctccccatcctgcaggggtcggcaaggatgtcctctccttagagaccttcctggacaccacgtggcacagactctgtcctcttggtgccacctcatcctattttctttgtcttttccggttttttttttttttttttttttttttgagatagggtcttgctctgttgcccaggctggagtgcagtggtgcagtcacagctcactgcaacctcagcctcctgggctcaagtgatcctcctgcctcagcctccagagtagctggaactacaggcacccaccaccacgcctggctaatttttttgtatttttagtagacatggggtttcaccatgttagccaggatggtctcgatgtcctgacctcatgatctgcccgcctcggcctcccaaagtgctgggattacaggcatgagccaccacgcctggcccatctgtgagattctgaagagccactgctgagcaattaagctgccctctgcagtgggaaattttctttgcaaggaagcagcaaggcggaggaggcaggagggttccctaagattgtgcacccacggcagccagcaatgtgcctgacacagtgaagggcctcggcaaaggggcgcctcctgtccccttcaaatccttacgggccaccccaggatctggtgacctggaacagactcctgtatgggcctttttcccctggtgccagcagggaacagggcaggatggaaaaaacacccagtagccagtggcccactgatgtcaccaagctgcagggctgcccagcattgattaaacacagctggtgtgggccaggcatggcacctcacacctgtgatcccagtgctttgggaggctgaggcgagaggatcccttgagctcaggagttcaaaaccagcctgggcaaaatagtgagaccccatctctaatttattattattattttgagccggagtctcgctctgctgcccaggctggagtgcaatggcacgatctcgactcattgcaacctctgcctcccgtgttccagcgattctcctgcctcagcctcccgagtagctgggattacaggcgtgtgccaccgtgcccagctaatttttgtatttttagtagagatgaggttttgtcatgttagccaggctagagactccatctctattaaaaaacaaacaaagaaaggctgggtgtggtggctcatgcctataatcccagcactttgggaggccaaagcgagcggatcacctcaggtcaggagtttgagaccagcctgaccaacagggagaaaccccgtctctcctaaaaatacaaaattagccgggcatggtggcgggtgcctgtaatcccagctactcaggaggctgaggcagaattgcttgaacccgggaggcagaggttgcaggttgcagtgagccgagatcacgccatcgcactccagcctgagcaaaaccccatctcaaaaaaaaaaaccagacaaatatagctggtgggttcttgggcaaggctggtgaccagggccctaggggaggatgtttccaagagctgccaagagcagtggggcccgggttctgcccgcctcttcctctgactgtttcctcatctggggtcacgggataagtgcagctccgcctccctggtcatgcaggtgactgtgaatgaaagtgtcttggaatcagaaggttctggcatgaaagctttgcaccagccttccaccagtgtgctgcccagcacgtgactatcggaaaaactttagcttatttcagcctaattacattccgttaacccaaagtctctgacgttcagggctggatcattctctgggatggggccatcctggtgcactgcagggtgctgagtggcgtccctgacccccacccactccatgccaggagcatctccagtcgtgacaaccacagatgtccccagatatcacccagagtcccctggaggcaaacctgtcccacttaagaaccgctggcctggaccagaaactggatctttcagggaggcagagctcaccagccatccaggcactgagcccggcccagccctgcagctctgaccctgccttgggctgtgagctctgaggaccccatcaatctgatcaagaagccacactaggtcacctcagaccaaggacattctgccatgatgcttcagactgttcttctccccatcctcctctccacctccagccctcaaagacctggcctgggtcccctcccgtggctcccagacctccgcttccagggagccctccggaatgtccttcctcctgccttcaatgctcctccccatcctgcaggggttggcaaggatgtcccctccttagagaccttcctggacaccacgtggcacagactctctcctcttggtgccacctcatcctattttgtcttttcctttttattttttttttttttgagatagggtcttgctctgttgcccaggctggagtgcagtggtgcagtcacagctcaccgcaacctcagcctcctgggctcaagtgatcctcctacctcagcctccagagcagctggaactacaggtgtgcaccaccatgcccggctaattttttaaatgttttgtagagatacggtcctgctatgttgcccaggctggtctcaaactcctggcctcaagtgatcctcccacctcggcctcccaaagcgctgagattacaggcgtgactatttccttatcttctaagaccctctgtttggtttgccagtgtgtctgggcatgtgctgtctctgtgtgacacatgctccctgagaacaggacttgattccacctgtatcaggctgggcccccagcacctaggctgtccctggcacacagtgagtgtcgggtcaatatttgcgactgaccgacgggttggccttccatctactcttccactcaccagcttctccatcttgcccaaatccctgccaaccccagggcactgaggacacagattactcctcacccatgccccttgcaaagctctcagccacatttttctcttttctacctgtatgtgtgtggtgtgtgtgtgtgtgtgtgtgtgtgtgtgtgtatctcactctgttgcccaggctggagtgcagtggtgcaacctcagctcactgcaacctgcacctcccctgttcaagcgattctcctgcctcagcctcccaagtagctgggattacaggcacgtgccaccacacccacctaatttttgtattttcagtggagacggggtttcgccatgttgtccaggctggtctcgaactcctgacctcaaatgatccacccgcctcggcctcccaaagtgctgggattacagacgtgagccaccgtgcccagcctgttctattttttttttaataaacaattttatttggagtaattttagatttacaggaaagttgcaaagagagagtccccgcccacgcctcaccagcttcctcttcaggggccaccctgtgtaaccacagggcattgctcacagctggggaacgctggcaccttcctagtaaccaaatgccacagcgattcagcttccctcagttttcccctcacgacctttcctgccccattgtgaccccatccaggagcccatgtggcatctgaccgtcccatctccgtgggttcctctgggctctcagtttcttggtctttctttggtatttccatgaacttttttgtttgtctctttaagaaaacggttactatccatgaaaaacaaacaaacaaaaaatgtcattctggctaccctgagagcttataattgctattttaaaatgaatgaatacctatttgattgacattttctcagttttgatttcaaattcaacaaatatccgtaagtagaaggcatataaacaaaagctccttggaataatcgtcaggaccagagagtttgagaacctttgtcctaagccaggggttagctaactacggcccctggaccacatctagctgactgtgtgtttttgtaaataaagttttattggcacacggccacacccacttgttgacatattgcttgtggtggctttcccgctacaatggcaggcagagactgtccagcctgcaaaggctaaaacatttgccatctggatctctgcagaaaagtttgctaccccaggcctcgcacatagtaagttcatagcaagtatttgtttatagtaaggctgagccctaatcagggtgaagggcaaggtcagacatcggaggaccactgaaatgtccattctgtcccacctggtacagcaaacgccaccatggagcaggactcagccatgaaaaggaacaaggctctgatgccggccacagtgtggatggaccttgaggacatcacactctatgaaaggagccagagacagagggccacgcagtgtgtgatcccatttctacgaaatgtccaggacaggcccatccatggggacagggaggggatgcgtgtgtggcagggctgccggggggagatggggagtgactgctcatgggggacagggcttcttttgggggtgataggatgttccggaattagataaaggagatggttgcacaactctgtgaatgtaaaaaccgctgagctgcacatttttaaagggtgagttttacgctgtgtcagttatatctcaataaagctaatcctagcattttgggaggacgaggggggggcgcggatcacctgaggtcgggagttcaagaccagcctgaccaacataaagaaaccccgtctctactaaaaatacaaaattagccaggcatggtggtgcgcgcctgtattcgcagctacttgggaggctgaggcaggagaattgcttgaacccgggaggtagaggttgcaggttgcagtgagccgagatcgcgccatagcactccagcctgggcaacaagagcaaaactctgtctcaaaaacagaaaagaaaagaggagaggggaggggaggggaggggaggggaggggaggggagaggagaggaccctgtagaatgaaagaaaggcagatccccctgcaccctggctacaggccgtcgtcccgacccctctctctgcaggcaggtcactgcccccctcacaaacctctgtcctgatcccccaacccacacaccagagctgggcccatgcaccgggaaacctgccaccccaggggccactccagtctcagaccaacaggatattaaaaaaggcgaaacctcagaaccgtttcctatcgaaaccaattagaaagctcttgggtatgagtccaatgttttcaagcaactaaaggcaaaagagaagattttcaacgaaacatcccagctgggggtgagcttcttagggtcctgtcatcggccaccctagagggacctaggggtgagcttatgccgtcagcacccccagccaacgtgggtcggccagttagctgggcgtggtgttgtgcgcctgtaatcccagctacttgggaggttgaggcaggagaattgcttgaacccgggaagtggaggttgcagtgagccgaaatcgtgccattgcactctggctccgggcaacagagcaagacagctctgtgcagagaacagactcctgcggtggaaatgctggctgcctttgaggctgggttctgtgaccttgggtttcccagcctgagcttccagtttcatttataaaaggggtgacgtggccgccttcctgcaggcgctctgaaggtggcagattacacagaggtggtacgactcatacaggtttctgcaaacgggggccccatcaacagtcacctttccttagcacagcgccttcctcctggggtgacctcgccccttcctgcacaccccaggagcttcctgagacctgagtaaagctcacttcccttgcaaggggtttagtgacgtcccttcaaaattcttgtccacggggaacctcggaaaatgactgttacggactaattgcatttgcttaaaacttatgttgaagctggatgtggtggtccacacctgtggtcccagctactcgggaagctgaggcgggaggattgcttgagccctaggatttcagggctgcagtgagctatgatgctgccactgcactccagcctgtgcaacacagcagcaagactccagacacaaaaaattaattaaagaaaaatggctgggcacagtggctcactcctgtaatcccagcactttgggaggccgaggtgggcagatcacctgagataaggagttcgagaccagcctgaccaacatggacaaacctcatctctactaaaaacacaaagttagccgggcgtgttggtgcgcgcctgtaatcccagctactcgggaggctgaggcaggagaattgcttgaacctgggaggcagaggttgcagtgagccaagatggcaccactgcactccagcctgggtgacagagcaagacctcatctaaaacaaacaaacaaacaaacaaacaaaaacaaagaaggagacacagagagacagcagaaaacagaagcagagactggagcaattcgacggtaagcacaagccaggtttgccagagcccccagaagccagaggacgcggaaggatcctctcctgtagcgcccaggggagcacagctctgcagacagcttggtttagtacttctgccctccagaaccgtgagaggacacacgtctgcggattgatacttccgggtctgtggtcacctgttatggcagccacaagaggctcgtctgccccttttctctccccttccttcatgctgatcaccacggaggagtgagttcgattccctctgcctgcccaaaaccctcatcaactttttttttttttctctctcttttgagacggagtcttgctctgtcacccaggctggagtgcagtggcgagatctcggctcactgcaagctctgcctcccgggttcacgccattctcctgcctcagcctcctgagtagctgggactacaggcgcccgccaccacacccggctaattttttgtattttcagtagagacggggtttcaccatgttagccaggatggtctcgatctcctgaccttgtgatccgcctgtgtcggcctcccaaagtgctgggattacaggcatgagccaccgcgcccggctcctggtggtttttaagcttgcaaagggtgcgggataagccctgcagaagtcaatggtcagtaatgagggctggggattcagcccatctccagggaaagcccccgaaactggcaacaccagctgcttccgggaaggggaacccaatgcgagcaacgcggcagagagggggcttccgggaaggggaacccaacgcgagcaacgcggcagagaggggggcttccgggaaggggaacccaacgcgagcaacgcggcagagaggggggcttccgggaaggggaacccaacgcgagcaacgcggcagatagggggcttccgggaaggggaacccaatgcgagcaacgcggcagagagggaggcttccgggatggggaacccaatgcgagcaacgcggcagagagggaggcttccgggatggggaacccaatgcgagcaacgcggcagagagggggcttccgggaaagggagctcaatgcgagagcaacgtggcagagaggagggctttgttttcactttcaccgtgtatcatttataccactagagctctgacaccccgggcacggccactgatagaaaacattggtccttcttcctgggggtgtgtggccaagtgagggtgggtgagggagaagccactttccggctaaggtcctcaacacccaggctcagtctgagctcttctgtgtcccaggaggcaaaaaggtgaccacaggttgggctgtagtatcaaacccagaacaaacggggtgttccaagcctgggcaacatagccagaccccatctctacaaaaaaataattagccaggcgtggtggtgcacctgtagtcccagctactttggaggctgagatgggaggatcgcttgagcatgggcatttgaggctgcagtgagctgtgatcgtgccactgcactccagcctgggcaacagagcaagaccaggtctcaagaaaacaaataaacaaggtgttccttacccaaaggaattgcaaggaggggctcggacagatacttgtactgttcactcatgttcacagcacccaaaaggtggaagcaatcaatccaagcgtccatcaacagatggacagataaacagcatggtgcatctgtatgatggaatattactcagccatgaaaaggaagggaatcccaacacaggctgcaacacggatgcaccttgaggacgtcacgctcagtgagagaacccagacacaaaaaaccaaattggccaggtgtggtggctcacgcctttaatcccagcactttgggaggccaaggcaggtggatcacttgaggtcaggagttggagaccagcctgggcaatgtggtgaaaccccatctctactaaaaatacaaaaattagccgggcatagtggcaggtgcctgtaattccagctactcaggaggctgaagcaggagaattgcttgaatctgggaggcggaggttgcagtgagccgaggtcgcaccgctgcactccagcctgggccacagagcgagactgcatctaaaagaaaaggacaaatcttgtgtgactgcacgcctaggaggtccctagagccgtcagattcacagagacagtccatctgttgatggacgcttgagttgcttccaccttttggctgctgtgaacatgagcgaacagtacaagggaagcaggatggggggtgccaagggctgggaaggggacggggagcaagtgtttcacggggacagagattcagtctgggaagatggaaagttctggagatgacggtggtgatgggtgcagcaccatgcaaatgtgcttaatgccactgaactgagcccttagaaatggctaagatggtaaatactatgtttcatatattttaccacaattaaaaaaagaaagaaagggccgggcgcggtggctcacgcctgtaatcccagcactttgggaggccgaggtggaaggatcacgaggtcaggagatcgagaccatcctggctaacatggtgaaaccccgtctccaataaaaatacaaaaaaaattagccgggcgtggtggtgggcgcctgtagtcccagctactccggaggctgaggcaggagaatggcgagaacccgggaggcggagcttgcagtgagccgagattgtgccacttaactccagcctgggagacagcgagactccgtctcaaaaaaaaaaaaaaaaaagaaaaagaaaaaaagaaaagaaagaaagaaaggtgctccagtggctctcaggcagagctccacctctgtctggttgccggtggtgccacagcacagcaggcctctcgtctccggagcagtgactgtgacctgttgccagccctggcggctattcctagcagctcctgacctgcaggaggctgagcccagcagtgccttctgggaaggagggaaggagggaggctttctggtaattacccccaggcagagggcaggcgggcacaggggcccgagcccctccagcccatcccacaggctccagggtgtttactgagcttgcagaattccacgctgtgggctgggccactcctgccctgagacaggaagacaaggtcagctcagggcacagaagccatctcctggctgtcacctttccttgtgggtgcagagccggaccccaggcaggggtggacgcctgtggtttacctccctgggggctcgggccctgtgccgagggtgcatgtgttgtcccctggggcctctagacctcttcctttcttttgagacaagatcttgctctgtcgccaggctggagtgcagtggtgcgatctcagctcactgcaacctccgcctcccgggttcaagcaatcctcctgcctcagcctcccgaatagctgggaatacaggtgcacaccactgcacccggctaatttttaaaaatttttttgtagacaagggggtctcactcttttactgagcctggtcctgaatcctggcctcaagcaattctctcacttcagcaccccaaagcactgggattataggtgtgagccactgtgcccagccagggtttttatttttattttttgcagaaatagaggggggtctctgttgcccaggctggtctcaaactcccggcctcaagcgatcttcccatgtcggcctctgaaagtgctgggattacaggcgtgagccactgctcccagattagccagacttctctcttctcctcggtcacggggatcaggaagcagagaaccaaggttctgccaccaacttgtagaagggccatgggtcacccatgcccctcccagtgtttccatggttgccagggaagccagtgaagggcagagtctttggggaggaggaagctgggtcagagaggagatgagggtgtgagagggtgagcaggtagcgccctcaccgtgctgggcacaagacaaggacttcagagctgattattttggttttggggttttttgtttgtttttgtttttgttttgtttttgaggcggagtctcactctgtcgcccaggctggactgctcactgatgctcaccgcaactccgcctcccgggttcaagcgattctcctgcctcagcctcccaagtagctaggattacaggcgcccaccaccacgcctggctaatttttgtatttttagtagagatggggtttcactatgttggccaggctggtctcgaactcctgacctcaggtgatccacccgcctcggcctcccaaagtgctgggatgacaggcgtgagccatggcgcccggcctgattatttcatttactccctgcagcaaccctggactgcaggggtggtgatcaccccccattttaccaaacagaagcagagagtgaccgcgggtgcccacctgaccccgtgtctccagcgggaacgtgaagctgatgctgctcccgccccaggcctgaagccggccccctgccccaaaccagcctgaccagcggcaccgtggaaacccaccgggatctctgccacccacaggaggctggggcatctctcaccccctctgtgcctcagtttcctaatctgtcacacagggaggctggacccaaaccaattgattgttgtcatgggtggagccggaacccgctatggctccctcctgccctcgggataaaatgcagcctctgccgtgcggcctcctcactccctccctctcaccttttcaaggtcctggaaccatctctgcacctgtatcccccaccccacctgtcaccttcagggcactagcaacactcaactcatgtcacttcctccaggaagccctccctgaattcccgaacaaagctcctggtgtgggcacctgctttcactcttgggcggtgttgtcttcatcggttcactcaatcagggtctcaactggggtaattctgtcccctcaggggacactgggcggtgtcgggggacatctgtaattgtcatgacggagggaagtgggaccttccctgactaatattccctcacatcggtccatgctcctggcatggagtgggtggaggccagggatgctgctcagcaccctgcagtgcccaggacggcctcaccccagagaacagtccagtgtcagtgtccacagtgcccagggggagagacctgctttaattatttgggaataaactgagtgtcctccctactcacaccagacactggaataaactccagatggagcagacggcataaacccgggagccccagctcctgggactcatctcctctctctcttcccactcaggtgtggatttcaatgtgtgcagcctcctgggacctccgcagggcagaggatcatgggatgcagaatctcttggggtctgtggaatcttctatcccagagggtctcaaccaaggtgtttctgtcccaggggacgctgggtgatgtctggggatatttgtggttgtcatgactgggggtgctcctggcatggagttggtggaggccagggacactgtcagcaccctgcagtgcccaggatgacccaccccagagaacgatccacctcacatgttaaatggcggtaagggggtgaacccaccccctgcatggctccaggggcacccagagtggggccccagccctgtggccgcctctcctcccacttcctccgggcgcctgtcctctgcacctgcatcctctggccctggctcccttcagagctggtcacagctggcagcccgcgtgctgtaaacacccacccaggcgtgccagccagacctggctttctgtcactcccggctgattctgaattcccagtctcacatgggccagagggtgactggctcgagacttgcctctcattacgagcaaagctctgattcagccggaatattagtcagggtacagcatgtcacattccaggaggctgatcagctccgacctcaacaccggcagctgactcagcccggggagttgcatgtgctgactactccttctgagcctcacagttatgttctcgagatttcactcagtgtcctatggtgtcactggtcctggtcgcagacacagactcacctgtgtgcaggaggtcaggtgaggatcggtcccagcaccttcattctttgtttctttcactcactcagtaaacatctggtgaagacttggaccagatccctgatcttaatgaaggaggtgacggtccggcccaggtgacaggcacagttaatgtgatgatcacaacacagttgccatgtgaccctgggcacgtcagcccctctcagctactgttttctcctatgtgaagtggagatcattatctcaatctcaacatggcaaacaacacggcaagtgtatgagtcagctactgctgagtaacaacagcggcaacaaagacaccatttgccatctcacaacttctgtgtgtcaagagtctggcttaactgggtcccccgctcagagtcttataagcctaaaatcaaggtatgggctgggccgagttgtcatctggaatttggggtcctcttctgagctagtttggttatcggcagaattcatttccttgcagctctaggaatgaggtccctgtttacctactggctgttggatgtgagtgctctgagcccctagaggctactctcaggtgtctgccacatggaccctccacaggcagctcacgacatagctgtttgctttctttaaggcaagaaaccccttccctttctctctttctttcaactgtggtgtgtgtgtgtgtgtgtatatatatatataacataagacggatcatcttaaccacgtttatgtgtacggttcagtgatgttaagtatactcacactgctgtgcaatggctctccagaaccttccatcttgtaaaactgagacactgtatccactgaacaacagctcccctcttccctcccccagcccctagcacccaccattctcccttctgtctctctgaatttgacacctcgggatgtgcttctggtctcttttatgggctcacctgatgaggtcaggcccacccaggatgtctcctttttgatgagctcaggtcaactgactaggaatcttcgtcgcatctgcaaaatccctttaccgaacacacgacctaactgcattaacctaaccactggagtgacaccccatcgtattcgcaggtccagcccatcctcaagtgcaggggattagataagatgtgggcaccaggcggtgggggtcttgggcgccatcttggaattctgcctaggactgtagctgtaaaagacatggtggccattgctgctgtaggtgccattagtaggaaacacacacaaagtggcccccaaggagcacgtactatgcatcaggctctgtgcaaggcacagagaaaacagcaaagaactttggggaaagttgaagacttgaggtgaacaactggatatcttagtaggtctctctgaaggttgagcaaatggataggggatattgggagatgggttatgtcccttggaaagaactccaaatgtccctttcaataactttccactctaccagtcatctcctccttccagaaattctcaggaggcagcgcttggtggctcttctgcagatgccaggatggtgacggtgacagcaggccacgctcttgtgtttagaataggaggtccccaaggacacagagtcacagacgggtcaggtaagttgcctgggcgcccacacgaataggaggtgcttctggatttgaaacaagtcttctagtgctaggagccccagaacacacctagtgccaccccctccccacgacaaagcccaccagaagggctggctgcctaaagaggtagtggacaagacctcacagactcacagactagtgggagaagacagaagagcgtagccctgaacgcagtgtgggggcacacggtgattggaacctggcacccacatcaacggtcaaagtctagatggttttgtttggttgtactcccgcctccctctgaccccatgcccacgagtaagaggagctccgtccacatttatggacacttaatgttcctgcacacccataaataaggtgaagccgagtctgcatgtgtgcgaaagggcacagagctttgcacatacatggtgccagggtccatttcctggttttgtactatggttacgtaagatgtcaccactgggggaaactgtgaagatacatgtgatgttttttgctctgtgtgatttttgcaacttcctctgaatctgtaatgatttcaaaataaaggttgttttttttttttaataagtggagacacatttaggtgtaactgggacacagcctgccacctactttccaaatgcctcctttctcccaataacccccaccctctccccaaagacctggcagtactcctgcaagaggaagggatggacgccagaaaaagggagtgaaggtcctgctgattcggtcctggctgaggccgaacgcaggcccccccttccctttgccaccaagaggagtctaagatctccctggagaacatatcttgtagaaccccctccccttgagtgtgggcagggcccgtggacatgatgagatatcactcccctgattaggttgcttttcaggaaagaagggattttgaagaggtaaataaggtcctaaatcagttgaccttgagttcactgaaagggcgattatcctaggtgggcctggtctaatcaggtgaccctttaaaagggattgggcctttcctgaaatgagagcctggaagcatgaggggcctatggagaaggccaagtggcctgagagtggcctcaaagagctgagagttgccccctcctgacagctaacaacgcaacagaaacagtctatcaaccacaaagaactgaattctgaatgagcctggaatgagcttggaaggggatccgtcaccacacaaaccttcggatgagaatgcagccctggctcacatctccgaggtcagaagtttggacatagtgtggctgggtcctctgtgcagggtcttacccagccacactacatccaaacttctgacctatggaaccatgagataataaatgggtgtcactctaagctactgcattcatggtagttgttacgcagccatagctagctaatacactctttatgtgctgcagactagagcattctgggattttatggtcagctttcaaacttattcatacacaagggtttggacatcatgtccctccacaatcagccaagcaactcagcagtttcctcctgagtatgtctgagtatatcatcaaaaaggtctaatgactatgacattatctgattgtctcaacagcactgtgtggggctgaggaggcatagcaggcatgaagaccagaggaagaatggtgcatttagtattagacagcttgacatgcattaaccccttgagaggcaggcactgcctattctcccccctttcacagacgagggcattgaggttcagaaaagcacagagatggcccagggtcacagagccagtaggtggcagagttgggagcccaagccctaaactgctggttatgtcacctcatgaagccacttaacctcgctaggtctcagcatccttatctgtccagtgacgatcattctttcctcacgagtggttatgagatgaaatcagataactcaaggcctctaggctgagggtcagcaaaccttttctgcaaaaggccactgagctctgtccttgtagtatgaaagcagtcactgatgacaggtaaatgaatgtctgtggccgtgtgccaataaaactttattcataaaaacaggaagtggaacagagaacttggcccagggacctgcagtatgtctgtggctgtgtgccaataaaactttatttatacaaacagggagtggaggggggaacttggcccagggagctgcagtttgtctgtggctgtgtgccaataaaacttcatttataaaaacaggaagtggagggccagactgggcctggggtgggggcacagcatgtctgtggctgtatgccaataaaactttatttataaaaacaggaactagatgggggacttggcctgggggccacagttttcgaccccggctttagcagttttttccttcttttgctaacttctaaaatgaagccgactgaccctagaagtgccatttctgaaagaggaagagagaaaaggggtgaaaggacgttgaaccagccaaggcagactacagcattttcagggcgtctccccaagatctccaataaggacaactagcatcgactaggctaatcccgtgacggcctgttctgcggggacatcatcaccctggtgctgccctctcccccattctctagagaaaggagccccaaaagaacagataaactctgcctcctagaaaggtaagactcctggcctggcgctgtgtgggatcatgcctgtaatcccagcactttgggaggcagaggcaggtggatcacttgaggtcaggagttcgagaccagcctgaccaacatggtgaaacccgtctctactaaaaatacaaaaattagccaggcgtggtgtcaggcacctgtaatcccagctacttgggaggctgaggcaggagaattgcttgaacccgggaggtggaggttgcagtgagccgagattatgctattgcattctagcctgggagacaagagtgaaactccatctcaaaaaaaaaaaaaacaaaaaaacccaacctgctataaacaaaactcacacacacacacacacacacacacacacacacacacgcacacagaaaacagactgggaattgtaaaaacagctgacgaacagagactttctactctacagggaagtctctcaccgtcagcactgtggacatcgggactggatccatctctggggtgaggctgccctggcactgcagggtgctgagcagagtccctggcctccacccactccctgccaggagcaccccttagttacactgagctatgatcgcaccactgcactcgcacctgggcaacagagtgagactctgactctaaaataataataataacaagaatataagaataataattcagatccatgtccgataaaaataataaataagtaaagctgaggctctaacatgaagtcattacgaggctcatccagccacagtgggctctgcactggggcacccgcctgggcctctgcctggcccatgtctgctcaggagccctcagccccttgaaccctgctggtgggacagggggcccctctaccaggcccctaacttctcaacagaccccaccttgggcctccccaggctgcaccttaaccatctatgacacgcatccccaggcggcaccgggagtgtctgcgcagagatccgagggtgttagcctggcaggggccctgcaggtgggtgctggttcactaaaacgatgaagcggatgggaggaaaattagcatccaacgggcctcatcattgctgtcctgggcaatggactctgacccctgctgtagagggtcagagagggtcaaggtcaagccacagattggcagagccatcctctctggcctccactcggctcccccatgtcccctgcccccagcatctcatcatatgcgactgtcaccgccgtgtgtattttgagtcaaaggcggccaaggctcgatgaatctgccgatgaccaagttggtgcctcatccctcgttctgtgggaggctgactgttcaagcggttgcttagcaacaggcgcgcgcgcgcgcgcgcacacacacacacacacacacacacacacacacacacgagaggtggctgtggtctgcacactgggctggggtactcagatccccgggctcggtggtcgtggatgtgagcctctctgggtatggagcctcaatcagtagagtcaggtggtcgcaataacagctctgaaacggggattcattgagaggacatcggtgggcttgaaaacgggtgtctgtttaccggggcttgagtgggagctgtagtaattctgtccagaagaggacagaagcctgctctcaactcacccgggaggcaggttcttctgcaccgggccttctccccccggcactgtgggcatttggggctgaatcattcttggttgtggggctgccccgggcactgcagggtgctgagtggcacccctgacctccaccccatggcatccaccaatcgaggcagccacaaatgtctcctgggtgcaaaattgccccgagttgagaccccctgggataggggattccacggacccccaagagactccgcgtcccatgatcctctgccctgctgaggtccccggaggctgcacacattgaaatccacaccctgagtgaggagggagagaggaggtgagtcccaggagctgggggtcctcctggtttacaccgtctgccccactgggcgtttatggtgcctatcatgagcaggaaaataactcgaatttttttccccaaaataatgaacccagagtttctccccctcagcactgtggacatttgaggcccgattgttctctggggtggggccgtcctgggcactgcggggtgctgagcagtatccctggcctccacccactccatgccaggagctcccccaagtcgcgaaaaccacagatgtcccagaaattgctcagtgtccccggggttgggggtggggggcggcatcacccagatgacccctgctatagagggtcaaggtcatgtccaagctctcctaccgccgggaagcactgccttgtcctgggctacagatgtggaggctgctgggtacagggagaggtttctgagtcctggagactgtggcagagcccctgatttcggcacagcgccccgtaattacttgcgggctgcacacacgttttctctcggggagggtggtagcaatgagctgtgaccttccgggagcagagcgttttcaggctctggctgtatatcttggcaattctttcaggggaacaacttgtccgcgaaaagaactgataataacgtgaatttcaacacgaccaggacatgctgaaatctggtgaccgaccagggggaaataaacccgctctgactggccgcggggactggagtttgcttaccacacaagagcccttctcaggataagaggctccagtaaagctctcagcagaaatgttaccaaaaaaaaaaaaccctcgccgggagaacaaggagctaccagaaaaacacactcggtgatctggaggtcgcaaagttcttccgcactcagtgaggcaagaagcaaaaaggctgaagaaatgcttatcctggaagaggggttctcacccgggttctgtggacatcggagccggattgttctctggggtggggtcgtcctgggcactgcaggctgctgagcagcgtcccgggcctccacccactccatgccaggggcaccccccagtcgtgtaaccacaaatatccccagacattgccccagatgagtgaggacagaggtgcaggtgggtgcaggtgggcacaggtgggtgcaggtgccccgtgaacccatctccatctgcaccctctgcatctccaaccccacccccagccccagtgtctcctaaggggtagaaagtcttcagtgctgaatgtgagagaccctgccttaatttgagggaaaaaaaagtaatcaagtctgtcccctgctcacatcagacaccacgacaaactcccaatggagcagacggtgtaagacagggggaccccagctcctgggatttgcctcttctctccctcctcactcggagtgtggatttcagtgtgtgcagcctcctggaacctcagaggtccatatgatcatgggacacacctgagacccaggaggtctcaacttggggtgattttttttttttttgagacggagtctcgctgtattgcccaggctgtagtgcaatggtgcaatctcggctcactgcaacctctgcctcccaggttcaattgattctcctgcctcagcctacggagtagctgggattgcaggcgcccgccaccacacccagctaatttttgtatttttagtacagaggagttttcaccatgttggccaggatggtctcgaactcctgacctcaagtgatccgcccacctcagcctcccaaagtgctgggattacaggtgtgagccaccgtgcctggccaacttggggtgattctgtcccctaagggacactgagtgatatttggggacatttgtggttgtcacaactggcgggtgcacctggcatggagtgggtggaggcccgggacgctgctcagcagcctgcagtgcccaggacagccccaccccagagaaaaatgtggccccaatgtctacaggagccagggggagagagaccctgtgttatttggaaaaaaacagagtctgctctctgctcacaccggacaccagaataaactcccaaaggggcagacagcataaatcagggtaactccagctcctgggattcacctcctctctccctcccactcagggggtggatggaattctcctctggccaaactgaaccagctctctactgccttcactcaggggcgcacgagtctctaactcacaggcgaggatccaggccctctgcccgccaggacaatgacccctctctgagctggggagtggcagccccaggtccacagccagttctcaccctgaggagcatgacatctgggaggggggatgacaggcaccccagggcctgatggtggggacaagccagggtctgattcccatggcaggatgacctgcactctcccagggccacccagccctccagggatgctttatgccttccattctctggtccgagctctgctctggagacacctctgtgcccgagtgtgaggtgcattccctgactgccttaaggccactcctggggagcagagccagtgcctcccgcctcctgccacgcacaacacccagggaccgcctctggttttgggcagagaggctctgagtgtgcccacaggggcccctagggcaggggccaaccatctgggtttgcctgggacttagggctgtcagtgttgaaccaggaaggtatcaagcaaactgcagtgggggtagtgacagagcttaaagaggggctcgggggtgactgaagacatctgggatacagtcagtatgcactgcctgcacctccatccccacctgcacccacctgaacccaactacgcacacctgcgcccatctgcacctccgtccccacttgtgcccacctgcgcccacctgcacttccgtccccacctgcacctctgtccccacctgcacctccaactccacttgtcctcacctgcacccacctgcacacccactgcacccccgtccctacctgcaccccccgcatctccagccccctgccggctccaggcccggggccaggaaactccgtgggcctcctctgccccctcgtggccgccagcggtaacagcagccctctgcaaatcgagcttcagaggccccaggaacaggctccccccgcccccgagcccggcccgtctttgctgttgtcgttgttgttttgccctggggcctgcagaaggataggagcaggggatcacggtgctggttttgtcatcaggacaggcagccacggccctcacttggcggcgcacctgctctcctggagaggctgccacccagaggtcagagacccccgcaggcgcctgcacccctcacagcctcgctctcctccccgtccgtccttgtagggaggtgagtttccaagcttcccaccctgtgcccgcaggagccaaagccgcactcgcccagcccagcgcccagcaaacaggaggtgctcaatgaatgactagcaacattattaaaagatcaggaaaagcccgcatcccacgccaccctttgtaacagagaaccccttcaaggtcagccggcaccacacctgctcaccactaattccgtcccctctactggggcctccccttgcgtgtgtggacatcagagcctgatgattctctggggtggggccgtcctgggcaccatagggtgctgagcagcgtccctggcctccatccactccatgccaggagcatccctccatcatgacaattacagatgtcccctggaggcagaatcacccctggttgagaccccccgggttaggggattccacggacccccaagagactccgcgtcccatgatcctctgccatgctgaggtcccaggaggctgcacacattgaaatccacaccctgagttgggagggagagaggagatgaatcccaggagctgggggtccccctgatttacaccatctgccccatcgggagtttattctggtgtccagtgtgagcagggactgaagtcagttttgaaataatgaatgggccgggtgcggtggctcacgcctgtcaccccagcactttgggaggccgaggcaggtggatcacgaggtcaggagttcaagaccagcctggctaacatggtgaaaccctgtctctactaaatatacaaaagttagccgggcgtggtggcatgcacctgtaatcccagctactcgggaggccgaggcagagaattacttgagcctgggaggcagaggttgcagtgagctgagatcatgccactgcactccagcctgggtgacagagcgagactctgtcagaaagagaaaagaaaagaaaaggggaagagaaggggatgggaagggaaagggggaggggaaggggaaggaggggaaggggagggggaggggagggggagggaaaggggaggggaaggggaggggaaggggaggggaggggaatggaaggggaggggaggggaagggaagagggaggggaggagaagggaagggggaggggaggggaagggaagggagaaagaaagagtctctccctcctgggcactgtagacattggggctggatgattctcttggatggggccatgttgagcagtgtccctgacctccaaccactcatgccaggagcaccccccagtcgtgacaaccagagacatccctagacatctcccagcatcccctggggaggggaggggaggggagggttgggtcagaatcacccctgcttcctccgtgagccccactagcatagttaaatttcaagtagttcagaatttaagtgtaaaacatgcaatcggaacaaaatacaggtgatttttttataatcttaaaatttggaagagatccataaaaaaaacaaaggagatgctcatgtataacaaacatttaaaatcctggccaggtgcggtggctcacacctgtatcccagcattttgggaggctgaggcagaaggatcacttgaggtcaggggttcgacaccagcctggccaacatggtgaaaccccatctctactaaaaatacaaaaattagctgggcatggtggcgaacacctgcaatcccagcttgggaggctgaggcgggagaatcgcttgaacccggaaggaggaggtggcagtgaaccaagatcgcgccactgcactccagcctggacaacagagtgagactctgtcaaaaaaaaaaaaaattcctctttggcaaaacccaccgtaagcaaagtcaaaagacacgctcaggaaaatatttgcagagttcaaacaaacgtttataaactgttcaaacaaatcaatgcgcctgagacgccggaacagaaaggtcagcaaagaccccagcctggcagcccacagaaggatgcccagagaacggtcggattcaccggccaccaaggacacccaaacaaaacaaagatgagcgcccctacttgccagcttggcaaagatttcacagctgcggctgggagggtggggaacgagcgctccaggaaggaatggggtgtttctggaggtttttgtggctggatgtcaaatgtagatggcaggcacagagctcagcagcacatccactcgcaggaatttaacttaaacctcaaccatccaaggggagggattcaggaaggaaggagagagggagggaggcagggagtgggggaggagggggggaagggagggaagggagagaaggagggagggagggggaggaaggaggggggaagggggaagaagggagggaaggagagggtaagggagggaaggagagggtaagggagggagggagggaaggagggagggaaggaaggaaggggagggagaaaggaaggaaggagggagggagagagggaaggagggagggagaaaggaaggagggagtgaaggaagaaaggaaggagggagagaggaaggagggaaggaaggaggggggagggagggaaggaagaaagaagagagggagggaaggagggagggggagggaggaagggagggaaggaagaaaggaaggaaggagggagggagagagggaaggagggagggaggaaggaaggagggagggaaggagggagggaggggaggagggagggaggagggagggaaggaagcggcagagggagggagatagagataggaaggaaggagagagaagggggagagggaggaaggcgagagaaagagagagggagaaggaaagaaagagagaggaaggaaggagagagagaggaagagagaaagaaagacatcaagaaaaagagagacattccaaaagcccagctagggggaccagttaaacacattataaaatcatttttaaagtgataagtcaccaccccctatcacacagagtgccttaacgagcgtcaagaatgagggtggatgtcgaggtttctcgacaaggaaagatgcccagtgatgggaatgaggaatgagagaatagaaccctccttgtgtgaaatctacaggtgaatgtaattcacgaaaatcccagcacaggcttggcaagatgctgaggcccatcggtgctgggctggggaacttaggggcttggccttctttgtacttttcttcattttacctttttagctgttgctttttttggagacagggtcttgccctgttgcccaggctggagtgcagtggtgtgatctcggctcactgcaccactcgatctcctaggctcaagtgatcctcctgcctcagcctccagtgtagctgggaccacaggtacacactgtaacacccagctaattgtttaatttttttgtagagatggggtcttgctatgttgcccaggctagtctcacactcctgggctcaagccatcctcccgccttggcctcccaaagtgctgcgatgacaggcgtgagccaccacacccaggctctcaccaagttctgacgtcaatcagggatcaaagggcttcaggccaaactgccatccctaaaatgacctgcttgagaaacttaagtctatgaaatgaaggggaggcactccagaaactggcagatggtccccagaggtggtacaagaagaagggactcgggtcccgcagctgaccctcagtggctcttagcctcgagaactcagccctgcgatggccagagttgcgcccggcagatccccacggggagcctcttcctctctccttgaggtcacaggcaggtgagtgaccaggcaagggaggaagtcggctctgctcacccctccagcccattccccatgtcagcagaaggaacagcaggctcccagcgacagccccatcctaaccccagaagccgtggacaggtcagctccatgtcaaaagggaccgcagatgggatgaagttaaggatcgtgagataggatagcatccggggtgatctgggggccccaatgtcctcatagcgtcctcaggagaagaggcaggagggtgagagtcaaacagagactggaagaggcttcactgtggctgtgaagggggaggagggggccccgagccaagggatgtgggtgcctctagacgctgggaaatgcgggaaccagattttcccctggagccccaaggagggactggcctgcccacaccttgattttccatgattttagcccagtgaggcctatgttagacttcttttttttttattttttctttttttgagatggagtctcactctgtcgcccaggctggagtgcagtggcgtgatcttggctctgcaacctccgcctcccgggctcaagcgattttcctgcctcagcctcctgagtggctgggactacagatgcacaccaccacacctggctggttttttttgtatttttagtagagatggggtttcaccatgttagccaggatggtctcaaactcctgacctcaggtgatccgcccacctcgacctcccaaagtgctgggattacaggagtgagccaccgcgcctggccctacgttagacttctgagcttcagcgctgtcagataataactgtgtgggagaagccgttctacatcagtagtcacttgttacgtctggggcaggaggtgcctacatccaccagtgcccaaagaggatctagcagctccgatccaggccctcggggcttagtgggcagccccaccagcccacagcctgcctgccagggagctgttctcacagacccccaccatgggacacgtgtttctgggacaggtcatggagaacgatgaccccatcacgggcagtctttccaaaagggcccacgggagatcagaaatcgcaatgtttcttgctgagaattgccgtatcctagcttgcaaacactattagctccgcagctgctagcgtttccctgtcgaaatgaatggggttatttgtttctgttttttagacagggtctggctctgttgcccaggttggagtgcagtggtgcaatcatagcccactgcagcctcgacctccggggctcaagcgatcctcccacctcagcctcttcagtagctgggatttcaggtgtgcaccaccacgcctggctaatttctgtattttttgtagagatggggtttcaccatgttgcctgggctggtctcaaactctcaggctcaaacgatcctccccacttcagccccccactagcagggactacaggtgcgtgccaccatacctgtctaattttctgtagagtttaggatatcgctctgttgaccaggctgatctcaaactcctgggctcaagccatcctcctgccttggcctctcaaagtgctgggattacaggcgtgagccatggcgcccggccagaactgaatgtttgaagaagcccaacaccaaacctgtggcagccccaggaagcaccgggaatgcatagtctgagccctctccgggctctgcacaccttcccgccctgcaccatgtgcaccggaaatgcaggagacctctccgggctctgcacaccttctggccctgccgtcggcacccgaaatgcaaagtctgcgccctctccgggctctacacaccttcccgccctgcaccatgtgcaccagaaatgcaaagtctgagccctctccgggctctgcacacctttccgccttgcgccattggcaccggaaatgctaagtctgagccctctccgggctctgcacaccttcccaccctgcaccatgtgcaccagaaatgcaaagtcggagacctctccgggctctgcacaccttccggccttgcactgtccgcactggaaatgcaaagtctgagcctctccgggctctgcacaccttcccgccctgcaccatgtgcaccggaaatgcaaagtccgagacctccccggactctgcacaccttccggcccggctccgtcggcaccggaaatgcaaagtctgagcctctccgggctctgcacaccttccggccctgcaccatgtccactggaaatgcaaagtccgagacctctccggactctgcacaccttccggcccggctccgtcggcaccggaaatgcaaagtctgagcctctccgggctctgcacaccttccggccctgcaccatgtccactggaaatgcaaagtccgagacctctccggactctgcacaccttccggcccggctccgtcggcaccggaaatgcaaagtccgagacctctccgggctctgcacaccttccagccctgcgcctcctttttcgggctgagcttttctgttggtgtcacagcttcactggggtgcagttacacaccctgcgatgcacactgggcacgctaatcttcaagcgcacatggttctaagggttgccattcatttctacagctatgcaaccatcagcataatctcaatgggacgctgtcatcgactcccagagctgccccgatcccaaccccccagcctccaggcgacctctgatctgtcaccttttctagaattttcctgtaagtggaattgtacaatatgaagtcctttacatttttatgtttggcttcataaataaatattatacatatattttatatctacactttttgcatctacactttattttattttattatttctgagatggagtctcgctctgtcgcccaggctggagtgcagtggcgcaatctcagctcactgcaacctccgtctcccgcgttcaagcaatcctcccacctcagccccccaagtagctgggattacaggtgcctaacaccacacctggctaatttttgtatttttagtagaaacggggtttcgccatgttggccaggctagtctcaaactcctgacctcaggtgatccacctgccttggcctcccaaagtgctgggattacaggtgtgagccactgcacccggcctacactttatatatatatatatatatatatatatatatatatatatatatatatatatataatgctctatctatacatgcatcatgttattgagatgtaattcatatgacatacagtgcacccatttaaaatgcataattctttctgagtattatctgcggcaccaaaaagaagaaaaaaatcataaaataaaaagaaaacgcacaattcaatggcatttagtacattcagagtcctgcaaccatcaccactaattccagaacattctaattatgccaagaagaagaaacccatcaaccatcacttcccatgcccctcccagtctcggcacccacgcatcccctccctgcctctgtggatcggcccgtcctgaaccttttgtagaaaggggatcacatgctgtgtggccttttgtgtctggcatctcttactgagcgtgacgtcctcaaggtacatccacactgtggcctgtgtcaaagcttcattccttttcatggctgagtaacactccatggtgtggatggaggatgttctgctgatccattcacccattgatggacatttggagtctttgccttattgctaaatttgaacatattcttgacttttgagtacatctgtttctgaattacctctcatgaccattgactactaaggatgagaccaaaatgatttatactgggcttagctaaaatatgcatttttaaggtacacattacatgccataaaattcaagtgaagtgtactgctcaaagatacttcagggccgggtgcaatggtacgcacctgtaatcctggcactttgggaagtcaaagcaggaagatcacttgagccacggagttcaagaccagcctgggcaacaaagcaaaccctaactcttttctgtttttctttctttctttcttttctctctctctctctcttttttttttttttagaaggagtttcgctctgtcacccaggctggagcgcagtggcatgatcttggctcactgcaaccaccatctcccaggctcaagtgattctcgcacctcagcctcccgagtagcttggactctaggcacctgccaccacgcctggctgattttcctatttttagtagagatggggtttcaccatgttggtcaggctggtctggaactcctgacctcaggtgatccacccatctcggcctcccaaagtgctgggattacaggcatgagccaccatgcctggccaaaaccctaactcttaaaaaaaaattttgttttaagatttttaagtaagttcaccaggttgcggtcaccccgacccgaccatcgggtccatttccacgtccctggcaagtctctggtgcacattcatgtccccagcctccaatcaccacgagtccctttctgtccctatggctttgccttttctggacatttctgccttcctttctacttatttttaaatggtttcctcttcctacattttaaaagccactcatgattctctagggagaaaaacgaggagtaaatcaacagaggagagctaaagggccagcgacgggtcactctccaggtgcacaggagatacgggtgaaggctccttaaaactccctaccatggcacgaagacaccggaaaggcatgcagcaccgctgtgggcttcccaccctgaccccatccaggggctccggcaccagcaggaccagtgagtgccacgttccctgcctcgtgggcgggaaactctgccaggagctagcagctgttacccacacctgctccccattacccatacttggtggatacaaacagccgacagacccaggtcaaggccaagacgcccgccttgacggcaaccccacgtcttacatccagggtgcaaaacagccaactgaacctcaaatcataacaaagaaatgcattacagcaccgacctgtgcaggaggtctcgccgtctgcagcaccgagatcccgaaaccaagctccactccctggaaaaaacacatagagttagtttggcgtggcttggctggaggcaccatgcatgtgttgatggggtcagcattggagaacggcctcgcgcttgtgattggacaaggacagaaatcattttggcaaccaggcgcggtggcttaggcctgtaatcccagcactttgggaggccaaggcaggtggatcatgaggtcagaagttcgagaccagcctggccaacatggcaaaatcccgtctctactaaaaatataaaaattagccaacgtggtggtgggtgcctgtagtcccagctacttaggaggctgaggcaggagaatcccttgaacccgggaggcagagggtgcagtgagctgagatcgagccactgtcctccagcctgggcaacagggcaagactctgcttcaaaaaaaaaaataatagaaaaggaaaaaagcagaagacaattcactgaaaatatttattattagagatttatgacgttattcctaatacattttccacgtgtttgaaaactgaactgagtgcaaggattgatgtttctacggctcttcacagtttatcaaaaacatctctgtacatctttggagcctcacgatctccctgggaggaagaagaaggggctgagttagtcccacggtgcccagaaggcacccaacgtatccaggtctgcccaggacttttccagagttagcctgaaagtcctgcatcctgggaagtccctcagccccagctcagctggtacgggcagtctctgagcagaaccaggctggcaccacatgcctgaggctgcgaccaggaactccccacctcgggggactcggggggaccctgccaccatcactgacaggacaagctccagggccaaagctgttcctgcaaacaccgtggtttatatgaaatccttgcctccctctggagcctggaatcctggcatgggtcaggcagcaggggcagcagaaccagcccccataggaacgtgggtgctgggtctctgggagcctcgctggtgacagtgctttgggctgttgtcccagctcgctgctggggatgtggcgtgtcccgcgtgacacatggggagagggcctggaagctgggcctagaagccgggcctggcctccccgacccaccccacgagcctttcccttcccaaactctgctctgtgctccatgtcctcttgctgggacaaaccacagtcacaaggaggcctcatgcggagtccagggtcctcccagcgagtcgccccatctctacaaaatgaccccatcttgacaaaaaaaatttaaaaattaggagggtgtagtggtgcccgcctgtgaccccagctactcgagaggctgagatgggaggatcgcttgatcctgggagatcaaggttgctgtgagctaggattgcaccactgcactccagcctaggcaacagagtgcaatcctgtctgagaaaaaataaaaataaatgccacatggggccaggcacggtggctcacacctgtaatcccatcactttggggggccgaggtgggaggatcacctgaggtcacgagttcgagaccagccgggtcaacatgttgaaatcctgtctctactaaaaatacaaaaattagccaggtgtggtggtgggcgcccgtaatcccagctacttgggaggctgaggcaggagaatcgtttgaacccgggaggcggaggttgcagtgagctgagatcatgccactgcactctagcctgggtgacagaacgagaccctgtctcaaaaaaaaaaaaaaaaaaaaaagccacttgggatccaggataggatcctaaaacagaaaaaggacattagaagaaaaaaaccgtgaaactgggataaagagtgaaatttagcttatagaaatgtacccacatgggcttcttggtggtcacaagtatatggtccagcctgggcaacatagcaagaccccatctgccatctctataaaaacaatgtaaaaattagctgggcatggtggtgcaaacctgtagtcccagctacttgggaggccgaggcaggaggatcacttgagcccaggaggtcgaggctgcagtgatctgcgattgtgccactgcactccagcctgggcaacagagcacggcactgtctcaaaaacagaccaaccccaaatgcatggtgacttcataagatgctaacataagggaaaactggtgagaggtagacaggaaatctctggatttctttgcaactcttctgaaaatctaaaattaaaagttcatttaaaaaaaatgcagactttttaaaatgctagtttccgttctacgagctcagggtaatttaccatcaataaaaggtagggatagggagctgaaatcctcactgtcacctgcaggtggtgcccttgccacaggaatgccctggcacccttgggctctggcagcagctggaatcttgcaggatctgctacaccagggcctgccactcaggacagcagcagctcagggcagcagggatgagtgatgaaagggctggagcggcatgcccacggggctgcaggaggcccagactcctgccctccaccttgcagggcagctatgaacataatccttcaactctgaatcatgtgtttttttttttgttttttgttttttgttttttttgagacagggcctcactctattgcccaggctggagtgcaatggtgtaatcacagctcactgcagcctccacctcctgggctcaagcgatcctccttcctcagcctcctgaggagctgggcctacaggtgggcatcactgttgtagtttttatgttctgggaagggggaaggaatgtgcttaatttgtgggctaatttttaattttttaaaaatagagacagggtctttgctatgttatccagcctggtcttgaactcctgggctcaagtgatcctctcaccaccttgtcctctgaaagggctgggattacaggtgtagccatttcacctggacaaccttaaattactgaatgaatttgaagtggtctggtgcgcccttcaactcactaccctgccagcgacaccgtacacaactagggcacatcttatcaaaaccagcaaactgagagaggcggatacattcagtgtagacgctcacccctaggaattattattattattattactttttgagacggagtcttgctctgtcacccaggctggagtgcgatctcagctcactgcaagctccacctcccaggttcaagcaattctcctgcctcagcctcctgagtagctgggattacaggcacctaccaccacccccggctaatttttgtatttttagtagagacggggtttcaccatgttggtcaggctggtcttgagcccctgacctcatgatccacccgcctcagcctcccaaagtgctgggattacaggcgtgagccaccgcgcccagccaggaatcattatttttaaacagccttattgtgaactaacgcctgtaccatacaactcgcccacttgaagtgtataattcattgttttcagtatatttgcaaaactggccaaccatcacctttatgtagttccagaacattctcatcaccctacaaagaagccccctcgccatcagcccccgatccccagccccggcccccacgcacaccctccctgactctgcggatgggtctgtcctggacatttcatagaaatggggtcacacactgtgtggccttttgtgtctggtgtctctcactgagtgtgacgtcctcaaggtgcatccatgctgtgacctgtgtcaaagactcgctcctttccatggctgagtcttactcctcctgagtatggaaggacgtgttttttaaatccattcaccggcggatggacaatcggctcgttccttcttgttggcaattgtgaatctgctgctgtgaatattcgtgtcataggaatcttttttttttttttttttgagacagagtctcgttctatcccccaggctggagtgcagtggggcacgatctcggctcacggcaacctccacctcccgagttcaagcgattctcctgcctcagcctccagagtaactgggatttcaggtacccaccaccatgcctggctagctttttttgtatttttagtagagacggggtttcctcatgttggccaggctggtcttgaactcctgacctcaggtgatccgccagccttggcctcccgaagttgttgggattacaggcaacaatgattcccagccctaggaatcatttttaagatgagttctcactctctgccttcactgcaaacctccctgtccccagccctttaaccccagcccctggctgtcctcaagaccttggacttggcagtgaggcgatccctgcggatgccccttggtctgcactcggcctcagagcagcttgggtcagaggcgagcacagcgtgggtgaagccgcatcccagccgctctgtcctcgggccttgagccgcaccagctggcgccaggctgtcccccagcgaccttcagcggctcactcagcctgacagaaacgctgtgttttcatgttccctgtgtggacaaatcacaatcgacccgggcggccagcagtggagacaaggaggagagacctctccgcgggggttaggtcccctcagaaactgccgagctggggcaacacgaaccgctgggacctcctgttcataaattagtatggatttcaaggcgccaatagcccggctttaaacccagctcagggccctgggcacctatgggcagctggcccttccacccagcaggcaggcaagtctcagacacaggcaagaaacactccaggtagcaggtgccgaatgtcagcagggagagatcagtcccccttgggacacagaggccatggacagtggtggtggtcaggggacctcgtgtacgaagggctgccaccgcctcccggccctccccactgtgtcctggaggcacttctccagatctctgtccgacttccttccttccttccttcctttccttccttccttccttccttccttccctccctccctccatccctccctccctaccttccctccatccctccctccctccctccctaccttccctccatccctccctccctcccttccctccatccctccctccctcccttccctccatccctccctccctccttccctccttcctttcttcctccctccctcctgccttcctttcctccctctctttctctttttctttctctctcttactctctttctgtcttcctttgtctctctctttccttctttcttctttctctttcttttctctctccctttctctctctctctctctctcttttttttttaagacagtctcactctgtcacccaggctggagtgcagtggtgccatctcagctcattgcaacctccacctctcaggtttaagagattctcctgcctcaacctcccaagtagctgggattacaggtgcccatcaccacgcccagctaatttttgtagtttttgtagagatggtgttatgccatattggccaggctggtcttgaattcctgggctcaggcaatccacctgcttcggcctcccaaagtgctgggatgacacgcatgagccaccgtgcctgaccaatttctttctttaaaaaattaaaataggccgggtgcagtggctcatgcctgttatcccagcactttgggaggccaaggcaggcagatcacctgaggtcaggagttcaagaccagcctgggcaacacagtgaaaccccgtctgtactaaaaatacaaaaattagccaggtctggtggcaggcgcctgtaatgccagctactcgggaggctgagatgggagaatcgcttgaacccgggagacagtggttgcagtgagccaagatcgcactactgcactctagcctggacggctaagcgagactccgtctcaaaaaaaaaaaattaaaatattcgcatgccataaaattcccccttgtagaacctggagaatacgatgccaagtgaaataggccagacgctgagagagaaaaacactgcgtaatcccacgtattgtggagtccaaaaacaaaacaagcaaagaaccccaaatacagccaggcacggtggctcatgcctgtaatcccagcgctttgggaggccgaggcgggtaaatcacctgaggttgggagttcaagaccagcctggctaacatggtgaaagcccgtctctactaaaaatataaaattagccgggcgtggtggtgcatgcctgtaatcccagctactcaggaggctgaggcaggagaatcgcttgaacccgagaggcagaggttgcagtgagctgggatcgtgccacctgcactccagcctggggaacagagcgagactccatctcaaaacaaacacacaatcaaaacctcccaaatacatagaaacagaaagcagaagagcggttagtggtagaggagggaaaggaagggggagatgggggtcagaggatacatagtttcagctgtgttggaaacactgagagatgtcactgtagcctgtgaaccagctaaagatattgtactatgggctgggcacaagggctcatgcctgtaatcctagtgctttgggaggttgaggtgggaggattgctgaaggccagaagtttgcaaccagcctgggcaacatagcaagaccctaggccagaagtttgcaaccagcctgggcaacatagcaagaccctatctctacaaaaaatttaaaaatttgctgggcatggtggctccagggatcacgtgagcccagaaggcagaggctgcagtgaaccgagatcacaccactgcactccagcccgggcaacagagcaagactctgactcaaataaataaatcaaaataaaataaaataaataatagaaactgaaaacaaaaaccaggcctcacccacagtgtcgaaggcatgcatcttctagggttattaaggtgctggttgttatttttgcttgtaattctgaaaaggctgatagattttatagcccagtatctccaagcagcgcccaaggacacaaacagccagaccctcagctcccaaacctggggatttgcaacagacaaacacagagctgggaaattccgcagcagggcagatgagggatcgatctgagtcccatgatcctcggccctgctgaggtcccaggaggctgcacacattgaaatccacatcctgagtggggcggagggaggaggagaatcccaggagctggggggcccccctggtttataccgtcttccccatcaggagtttatcctggtgtctggagtgagaagggatcgaagtctatttttttccagatgaatgtagggtctccccctcggcactgtgggcattggggccggatcattctctggggtggggctgtcctgggcactgcggggagctgagcagcgtccctggcctccacccaccccatgccaggggcatcccccatctagagctgttccgttgccttgaatttctgccctctggcctcccctgtcctcatccttatgggatcttcagatggtgcccttgaggcccagggcccgtgtcccctcctcactcagccctcctatccacaggtgactcacagtccccttggcaccacccaggcgctgtccctggcctcgcccatggctaaccttggcaggcatccccaacagaggcgaggggacagctctcgcctgcctcggcgagcccgggttccagaagatgtgcccagcaccctgggccccccaccgccgggtctgggacacagatgctctcctccaaacctcccattcagaccctcgctgtggcgggggcggggccgtgtcttttgagactctgcatatgcacgagggggtgagtttgagtgaggcggtctccatgcagaggaaggtctttatttaggaagccaggtgggggcggggccggctggggaggagaggcggagaggaaagacgagcttctgcagatttcaaacctgtcatttcttttctgacgcataccctcccctcccgcttcatgacaagctctgttcccaccttccccgggttcccagagcagcctcctagacacgatccgaaacagcacgggtccccctcccaacccccaggcactatggacattagagctgggtcactctctggggtggggccatcctgggcactgcagggagctgaacagcatccctggcctccacccactctatgccaggagcacccccagtcacgacagtcacagatgtccccagacattgcctgatgtcccctggggaacagaatcatccccagaaagacctcctcagttagggggttccacagatccccaagagactgtgtcccatgatcctcccccttgctgaggtcccaggaggctgcacacattgaaatccacaccctgagtggggggagggagagaggaggagaatcccgggaactggagtcccctagtttatgttgtctgccccattgggagcttattctggtgtctgttgtgagcagagacgcaattcaattatttttttcgaaataatgaatgcagggtctcccccctctgcactgtggacattggggctggaccattctctgggctggggccatcctgggcactgcagggtgctaagcagcatccctggcctccacccactccatgccaggggcacccccgagttgtgacaaccacagatgtccccagacattgtccagtgtcccctgggaggcagaggcaggaggactgattgagctcaagagttcaagaccagcctggaccacatagcaagaccccatctctacaaaaaaaattttaaaacatagccaggtgtggtggtctgcacctgtgatcccagttactcaggaggctgagatgggaggattgctgagtctgggaggtcgaggctacagtgagctgagatcacaccactgcactccaggctgggtgacagagcaagactctgtctcaaaaaaaaaaaaaaaaaccacacacacacaaaaacaaaaagagaccctatctcaaaaaaaagagggggttaaataatctgactagatacctctcaaataaagacacgcaggcagccaacaggattatgaaaaaacgctgaagatcattaatcagccaggaaatgcaaattaaaaccaaaatgagatacctgttagaatggctatgatccaaaagataaaagataaaaaacattagtaaagatggccgggtgcggtggctcatatctgtcatcccagcactttgggaggatgaggcaggcagatcacgagttcgagaccagcctggccaacatggtgaaactctgtctctactaaaaatataaaaattaggccgggtgcggtggctcatgcctgtaatcttagcactttgggaggctgaggtgggcggctcacaaggtcaggagatggagaccatcctggctaacacagtgaaactttgtctctactaaaaatacaaaaaaattagccgggcgtggtggcgggcgcctgtagtcccagctactcgggagcctgaggcaagagaatggcgtgaacccgggaggtggagcttgcagtgagtcgagatcgcgccactgcactccagcctgggtgacggagagaggctccgtctgaaaaaaaaaaaaaaaaaaaaaatacatatatatataaattagccaggcgtggtggtgggcacctgtaatctcagctgcttggagactgaggcaggagaatcacttgaacctgggaggcagaggttgcagtgagccaggatcgtgccactgcactccagcccgggtgacagagtgagactccgattcaaaacaaaaaaaaaaaaaagaaagaaagaaaaaaaaaagaaacattggtaaggatgtggagaaaagggaaccctgtgtgctgttggtgggaatgtaaatgagcacagccattctggagaacggaatggaagttcctcaaaaaattaaagatagaaccaccatatgatccagtaatcccacttctgggtatacatccaaaggaaatgaaatcagaatctgtcagcctcattcacaatagccgagataggaaaccaacctacatgtccatcgttggatgaatggatacagaaaatgtgaggccgggtgcggtggctcacgcctgtcatcccagcactttgggaggccaaggcaggcggatcacaaggttaggagttcaagaccagcctggccaacatggcgaaaccctgtctctactaaaaatacaaaaattagccgggcatggtggtgcacgcctgtagtcccagctactcaggaggctgaggcaggagaagcttgaacccaggaggcgggggttgcagtgcgccaagatcacgccactgcactccagcctgagtgacagagtgaggctccatcaaaaaaagagaaagaaagatgaactagaccagaggttggtaaactctggcccatgggtcaaatgcagcccactgcttgcttttgtacataaagttttattggcacacagccgtgcgtgttcacttacatatcatccatggctgcttctgggctcctacagcacagctgggaggcctcgacagagagcacatggcctgcaacgccaagaatttacctccggccctttaggaagggttgatataatccgtgtactagagttagatctcagaggaccttgaatgccagaaacgagtaagtcctaatgatttttagcaaagagtaacactgtaaaaccaaatgtttacagatttcatgtgctggaatcctctgggggtggggcagcggagaggccttaaaacatgaaacagcgtcagatcaattttcaatgattgtcttcaaaattaaaactggctcattacaggcgcggtggctcatgcctgtaatcccagccctttgggaggtctaggaggacagatttcttgagcccaagagttcgagaccagcctgggcaacatggtgaaacccggtctctactaaaaatacaaaaattagttgggtctggtggtgcacacctgtagttccagctactggggaggctgaagcaggaggatgtcttgagcctaggagttcgaagctgcagtgagctgaaatggtgccactgcacttcaccctgggtgacaaagcaagaccccgtctcaattaaaaaaaaaaaaaaaaaaaaaaaaatatatatatatatatatatatatatatatatatatatacacataataacatttatcctaaaaagagaaacagtacaaaggcactcagagctgaaactcaaagtcgtctgccagtctctaactcctgacttttgggtttcatgtcctgctttataggactttttgaattctgcccccaaggatccttttcaaaaatcttttgtttcagccaggcacaggggcttgtgcctgtaatcccagctactggagaggctgaggcaggaggatcatttggagccaggagagctggagaccagcctgggcaacatagcaagacaccatcttttaaaaaaattttgtttctgttttggaaaaattttcgatttacagaaaagttgcaaatctagtccaacgttccctatgggcagcaggcaacctaggtaccgaggcaagagactgagggcacgagctgcctggctctgccttcgagatagcagtaacagaattagtgaaagtactaaaagtctctgaaatgcggaaataatggcgtaagctgtctcctctctctctctctctctttgcctcggctgccaaacagggaagggccccatgtccagtggacacatgaccttacctatcattggagatggctcatactccttaccctgcccccttgtcttgtatccaataaataacagtgcagcctggcatttggggccactaccggtcttcatgtcttggtggtagtggtcccccgggcccagctgtcttttcttttacctctttgtcttgtgtctttatttctacgatctctcgtctccacacacggggagaaaaacccacagaccctatagggctggaccctacagttctcaaacgcccctcacccagtttcccctcatgttagtatcttacatctggggtctgcaaattttttctgcaaagggacaaaaagtaagtattttatgctctgtgagctaaagggtcactgttgcatattcctctttgttatttgtttttttacaacacttttaaaatggaaaaggctttttagccccgagctttataaaaataagccaagtataaacaaaacgtggtacatcccccgaaaccaaaatgtacccccgtgttcacagcagcacgattcaccacaccccaaaggcagagacacccaagtgaccaccgagagatgaatggataaacacaatgtcatccattatgccacggaatatgattcagcctgaaaaaggaaggaaattttgacatgggctagagagtggatgaactttgagggcatcacgcccagtgaaatgagccagatgcaaaaggacaaatcctgtgtaactccacgcttaggaggtccctagagagtgagccacaccaaatgtaaactgtagctgttagtcaataatcatgtatccactggctcattagttgtaacaaatgtagcacattaatgagagagggtaacattgggggaaatgcgtaccttttcggggagaggagataggtgggaactctgccttctgctcaattcttctttaggcctaaaactgctctaaaaatagtctattaaaagggggacttgaagagacaaattgtgagagttgtatcacgaaccaagcgttctgatttttttttttttttgaaatggagtctcgctctgtcacccaggctggagggcagtggcacaatctcggctcactgcaagctccacctcccgggttcatgccattctcctgcctcagcctcccgagtagctgggactacaggcgcccgccaccacacctggctaattttttgtatttttagtagagacgaggtttcaccgggttagccaggatggtctcaatctcctgacctcgtgatccgcccaccttggcctcccaaagtcctgggatgacagacgtgagccactgcgcctggccttgattttttttaaataaaggagaggagggccgggcgcggtggctcacgtctgtcatcccagcactttgagaggctgagatggggggatcacctgaggtcaggagtttgacaggagtttgagaccagcctggccaacatggcaaaactccatctctactaaaaatacaaaaattagccaggcatggtggcacttgcctgtaatcccagctacttgggaagctgaggcaggagaatcgcttggacctgggaggcggaggttgcagtgagctgagatcacgccactacactccagcctgggaaatagaggagtgagactccatcttaaaaaaaaaaaaaaaaaaagagaggaggggagggaaagagggagggaaggaaagaggaagggagaggaagagggagaaagggtgggagagagaggaaaacagagtgagagggagggagagaggaagggaaggggaatgagtgtgagcgagggagggatggaggaaggaaggaagggagggagggagggagggatgagggaaggaagaggaaaggagagacacccactttagacaacatgatccgtaagcactgacatttatgactggatccccttccacaagcttcctgaataagccccagagagaagactggtcagtcttggccaaatggattttctgctttcccccgagcccctgtgagtatcatcacaatgtaataccatgaggatcaaaatctcctggccacttaagcctggattaacccacaccagagccatcctcctcaccgaggggccatggcggcgagcggatcacacagcagtcctcatggaatccgtcccaattagcctctgtcggattactcacagaacctgccatccgtggaaggcagattagcctaggatgcatgtgtaaatcccatttggtgaacgaaagcatattctggagatgattagcttatttctgcaagatggcatcaagtgggagataacacatcttcatccccgttacacccacaaggctctgtgtaattctccctgagcctcatccctttccaatcctgattccctgtgggagaaacacaattccttccattgaagggttgatgctgtgggtaagaccttttcatcctcctgctccaaaaccacagggaagggagaaactggacgtatatttttcatctgtttaccatgttcctgccctcaaaggtacaagaagacaagctagaaagtagacgaggctgggtgtggtggctcacgcctgtgatcccagcacgttgggaggctgagatgggaggatgggggcctaggagttcaagaccagcctgggcaacatagtgagacacccccaccaccaacaccccaccaccatctgtacaaaaaatacaaaaattagccagtcgtgatggtgtgcccctgtaatcacagctacttggaagcctgaggcaggaggatcactggagcccaggagttcaagactgtggggagccatgctcataccactgcactccagcctgggcaatggaggaagaccctgtctcaaataaataaataaagacacagtgacttttgcttgttctttcttgggtcatgtgttctgggggaagccagctgccatgttgtggggaaatgcaggcagtgctgtgaagaaatccatgtgttgcagaaatgggccctccaggccgggcacgttggctcacacctgtaatcccagtactctgggaggccgaggcgggcagatcacctgaggttgggagttcgaggtcagcctgaccaacatggagaaaccctgtctctactaaaaatacaaaattagccgggcgtggtggtgcatgcctgtaatcccagctactagagaggctgagacaggagaattacttgaacctgggaggcggaggttgcagtgagccaagatcgtgccactgcactccagcctgggcaacaagagcaaaactctgtctcaaaaaaaaaaaaaagaaaaggaaagaaagaaagaaaagaaagaaagaaagaaagaaagaaaagaaagaaagaaagaaagaaagaaagaaagagaaagaaagaaagaaagaaagaaagaaagaaagaaagaaagaaagaaagaaagaaagaaatgggccctccaggctgggcacagtggctcatgcctataatcccagcactctgggaggccaaggttggggcaggtcatttgagatcaggaatttgagaccagcctggccaacacagtgaaaccctatctctactaaaaaaaaatataaaaattagccagtaattggctaattactgtaattatgcctgtaatctcagctactcgggaggctgaggcagaagaattgcatgaatccaagaggcagaggttgcagtgagccaagattgtgccactgcactctagcctggctgacaaagtgagactccattaaaaaaaaaaaaaaaaaaaaaggaaggaaggaaggaaaaaaggaaagaaggaaggaacgactcatttgggcattttgccctcctgtcaaggccagttggaagctgaggcctccaccaacagccacatgagggcgccctcttgaaagcagctcctccagctccaatcgagccttcagatgatacagccccagcacattcactgccagaatcacccagtggagctgcttcctaactcctgagtgagggtggaaaaaactcaaactcaaattgcttttcctcttgctctcacatcaacagcaatcaacatggccaggtgcagtggctcacgcctgtaatcccagcactttcagaggccaaggcaggtggatcacttaagatcaggagtttgagaccagcgtgaccaacacggtgaaaccctgtctctaccaaaaatacaaaaattagccaggcgtggttgtgggcacctgtaatctcagctactcaggaggctgaggcaggagaatcacttgaacctggggggcggaggctgcagtgagcagagattgcaccattgcactccagtctgggcgacagagcgagactccatctcaaaaaaaaaaaaaaaaaaaaatcaacccaagatatttctgtgaccaaatgtgagaggagtttccccacacaccagctagctgtcccctaattcgattcagttcaattcaattcaggtgctatctacctggagacagccttggaccccacaggttgagggctaaatccccccacaagactgcccctaacctcttcagataccagtagcaagtttgggcctccagaacttccaactgaccagcttgaagttagggttgggtttaatttactacagcagctctcggaattcagggaaacacatttactggtttaatataaagcatattacaaagaatacagacgaaaagatgcataggatgaggtatagggaagaagggcaaagcttccttggcatgctacccttcaggaacctccatgtgctcagctatctcaaagttctccaaaccccgtccttttgaagttttatggaggctttacttcataggcatgactgatcgcgtcactggccactggtcatcacctcaaccttcagcccttctcccctccccagaggctggagggtacagctaaaggttccagccctctcatcctgccttgatctttctggtggccagaccattcctgaaaataactagaagctgtcagccatcagtcgacttatcatcatacaaaaagacatgactttgcagattccaaggattttaggagttctgcaccagaaaaaaatcaggacaaagaccaaataatataataaatataatgcaagtaatataatatcccactgacccacagaaactgcaggatagtaaatgcttgctgtttaagctaagtgttggggtaatttgttacacagtgatagataactggtacatctgcaaagggaaggaagggctgatccacatgactcctccaagcagatgttgctatagtttgaatgtgtctcccaaaaagcatattgtagaaactttaattcccaatgccaccatgttgagaggtgagaactttaagaggtgattaggttatgaaggccctaccctcattaatgccatctctctttctctctccctctcaccctttctctctctctcccccccctcctctttcttccccagttccccaatctttcatatatgtgctcttttgcccttccacctctgacgcagcaagaaggccctcaccagatgccagcacctcgacattggacttcccagtccctagaaccgttaagaaacaaatctctattatttataaattatccagtctatggcattccattatagcagcacaaaataaagacaggtgtgtagtcaaacattaccttttcctaaaagccagcaattggatttttcattttcttgtttttccaatatctatcaacctgataattgggagagatgcaaaagcccagatggataaggtacattcactgagggcaaatcagaagaatgaccaggccaagaaaatgattcattttggcattttgcaaattatcaagatatgcatgccagcaccagtttttaaaactgaacaaatccactggcttttatctatttcctactaaagcaacgtggcttgatcttgacactattaaactggggcttgattattctctggggtggggccgttctgggcactgcacagtgctgagtagcatccctggtctccacctactccaggccaggagcacccccaagtcacggtacccacaaatgtccccagacattaccagtgtcccccagggggcaggcttgcccccagttgagacccaatgctctaaggcatgtccctcaagggcaggacagccagggacctgacatttgatgacaggcctatcctccaccgccccccaggcccggctgcacttcctcctctgggaactgagtgggcaggacgggctgtcagagcccccttcccttcccacgctgacattctgccagcacgtggcaggggcgtcttgtctcgttggaggctggatatagaaacacagccctgtcctttgtgccatcgctgaagttgtcaacctcagccttcactcatcaccacagcaaccatctaaatatgtcaccagcaaagtgctgattgcaaaggaagggggcagagaggcctggacgggctctcacccaggtgcaggcgcaggggaggtgccgggactgggggagtgacgtggctgcttcagagccacgagactgatgacggccaggccgggcgtgacctggaacaggctccactgcaccctggggcacacagaacaaaggggcaggcctgcttgaccctgagggttcaaggtctctgtgagccgaggtcaaggagggggaaggaacaatcagacggttggctctgtgtcctgcaccctcagtgctctagagaccctcctcacccagtcctctaggtcactctgggaggatggccccggctgacaccgtctgccccatcgggaatctattctggtgtctactgtgagcagggagcaaactcatttttttgccagttaatgcaaggtctctcccctggaaaccgtggacattcagagctgggtcattctctagggtgcagctgtcccggacactgcagggtgctgagcagtgtccctggcctccacccactccacgccacgaccatcctcaagttgtgacaacgacaaatgtcctcagacaacacccagtgtcccctggggcagaatcaccctcagttgacaccccctgaattaggaaattccacggacccccaagatactctgtcccctgatcttctgtcctgctgaggtcccaggaggctgcacacattgaaatccacacctttagttggggggagggagagaggaggtgaatcccacgagctggggtcccctggtttacaccgtctgccccatcaggagtgtgtcctggtgagcaggaagcagactccatttcttctccaaataatgaatgctgagtctctcctcccaggcacggtggacactggggctgtaccattctctgggatggagccgtcctgagcactgcagcacgctgagcggcatccgtgacctccagccactgcatgcccggagcacttctcaatggtgacagccacaaatgtccccagacatggcccagtgtcccctgggggggggggggcaggatcaccctgccgtgctggacagtcctcgccacaccccacctcttggaactggaatgtctggtgagacgggcaacaaggatttgggaagagggccatgcgggacaaaaaaaagaaagaaaatgagaacgaacggatttctatttcccctcaatgtgaaaatagctccactgagtcccgaggaaggattgggtggggacgtacgctctggtatggccaaggtggagtgctggacaagagctactccattctgacttcacgactcgctgtctggctgggtgaccttcagtcccttgccactgtcgctgtgcctcagtttcccactctgtagaatgcacatcgaagcagcatccaccctgtgagactggttttggagattacataaatgagtatctataaaatgtttaaagtggtgtctgagccatgggtcatggcacatactggctttattatttagaacctggattacctccttttattattctttttcaatttattttacttattttttgagatggagtcttgctctgtcatccaggctagagtgcagtggtgcgaacttggctcactgcctctgcctcccgggttcaagtgattctcctgcctcagtcccccatatagccagtattagaggcgcccgccaccacgcccagctaatttttgtatttttagtagagacagggtttcaccatgttggtcaggctggtctcgaactcctgacctcaggtgatctgcctgcttcagcctcccaaagtgccaccgtgcccggcttatgttttaatttttattgtatttatttattcatttttattttgagacagagtcttgctcttgtcgcccaggctggagtgcagtggcacgatctcagctcactgcaaactcagcctcccgggttcaagggattctcctgcctcagcctcccgagtagctgggattacaggcacctgccaacatgcccggctaatttctgtatttttagtagagatggggtttcgccatgtcggccaggctggtcttaaactcttgacctcaggtgatctgcccacctcagcctcccaacgtcctgggattacataggtgtgagccaccatgcctgcttttttagtttttacttttcatagagataggatcttgctatgttgcccagactggccttgaactcctgggctcaagcgatcctccctgctcagcctccccaagtgctgggattacaagtgtgagccaccttgcctggccagattacctcctttctggactagaccagagcacagcaaagtgtttctgtctagggcaggatgtaaaaattttcagccttacggaacatatgttctctgttgcagctacacagttctgctgttgtattttgaaagcagccatagactatgcataaataaatgggcatggcccatcgtgtgccaataaaactttatttatagtaacaggtggcctggatttgcccccaaggccattggttgagaccctcgcaaaacagtctaagacaaaatagcaccatttcagcaactaaatactctcatctaggcagtgttccagtcttccatcctgaaattagatgagggtcctgtcaaaaaagattcacctccgatcctcaacatcacacggcagagttagcacagagcatcccttcacacaaaacacacactcatccgggcgcggtggctcacgcctgtaatcccagcactttgggaggctgaggcgggtggatcacttgaggtcaggagttcgagaccagcctggctaacatggtgaaacccaacccgtctctattaaaaatacaaaaatcagccgggcaaggtgctgcgcctgtaatcccggatacttgggaggctgaggcggcagaatcgcttgaacccgggaggcggaggttgcagtgagcagagatcacgccactgcaacccagcctgggccacagagtgagactccctctcaaaaaacaaacaaacaaacaacaaaaattttcacagccccaaggttttgtttctttgaaatgcagaaaacggctgtttcttttcttaccatctatcttctgtgcgtgaatacctcacctctatgtgctcgccagaaaacctcggctgcaaagggcattcggaatatctcatttggggccaggtgcagtgactgacacctgtcatcccagcactttgggaggccgaggcaggaggatcacttcaggccaggagttcaagaccagctggacaacacagtgagaccccatctctacaaaaataatttaaaagtaggccgagcgcaatggctcatgcctgtaatcccagcactttgggaggcggaggcaggcagatcagctgaggtcaggagttcaagaccagcctggccaacatggtgaaaccccgtctctactaaaaatacaaaaataggccgggcatggtggtgggtgcctgtagtcccagctactggggaggctgaggcaagagaatgatatgaatccaggaggcagagattacagtgagccgagattgcaccactgtactccagcctgggagacagagcaactctgtctcccaaaaaaagaaaaagcaaacaacaacaacaaaaaagaaaatctgaaaaactgtcacaggccagagatgggatcctggatggggccctggggcaggagaggacattagaggaaactgaggaaatctgaacagagtgcagacttgggttaatgaagatgtatcaatactggtttattcgctgtgacaaacgcaccatgccattggatgtgaatactaaggaaaattgggtggtgaggagatgaaactgtctgcactgcattcccagtttttctgtaaatctgaaactattctaaaatgaaaagtttatcaaaaaaaaaaaagagacagagagaagagaaggacgacaggcaattagctacttacgctagaaaatgctgtaaaatgtgattgagggaacattaagttcatgtgccagcatctaataatgagatgattatgtaaaacctagaaaagaaagacgctaaaaacgggatatgcaaattggcaggggaaatttgcgcttatgaaaagaatgggaggggtgggggaaccagtggctgggcggttggtcttgtctcctgtttccctggctcggtgacggccaccaaggaccccaaccccagggagatggaggggctgctggagggagcccccggaacacccgaggccaatttcggcagcatggtgtattccctaccaaggctgtcggcatccaggcagcgctcaatgaatgcctgctaagggtgcagccgctcctgggctggaggagggctgcagttttatggatggaaagttctagaaaataagggtgatgctgtggtctgaaggaagaagcaagacaactgataatatgccgtgacatcctgatctttgcacagcgggttagatattgtcacccacacctggtgctgacatttggggccaatggctgtggtagggggctgtgctgagtaccgcagggtgctgaggagcatccctggcctccatcctctctatgctgggaacacccctcaaccgcaaatgtccccagacattgccaaatgtcccctgggaagtaggatcattcctgctgagaaaccacggtcccacaatatccagcttaatccacctgacaaccccataagggatacatataatcctccttccacagatggggaaacacactgaaacgaggtaaagtcagctcaaggtcaccaccctaggagtaagtctcaaagaagggggtggtcgtgtgtgttgactgccactttagtaacagagacccctatgctgggcaatgctggtctaacatggcaagaatcagaaaactaccgctgtgggttgggcgcggtggctcacacctgccatcccagcactttgggaggctaaggcgggcagatcacgaggtcgggagttcgagaccagcctgaccaacatggtgaaaccccatctctactaaaaatacaaaaattagctgggcgtggtggtgcatgcctgtaatcccagctacttgggagactgaggcaagagaatcgcttgaacccaggaggcagaggttgcagtgagccgggatcgtgccactgcactccagcctaggtgatagagtgagactctgtctcaaaacaaacaaacaaaaacaaacacaaacaaacaaaaaaactaccactgtgggtcaaatccagcccaccacttgctttcgtcaataagttttgttgaaatacagccatgcccgtttatgtactatctagggcactttccaacatcaacagcagagttgagtgcctgcaacggagagcgcctggctcagagcgtcgaaaatatttactctctggctctttacagaagaggtctgttgatggctgggtgcagcggctcatgcctgttatcccagcactttgggaggctgaggcgggaggatcacttgaggccaggagtttaagaccagcctggccaacacggtgaaaccccgtctctactaaaaatacaaaaattagccaggcgtggtggcgggtacctataatcccagctactcgggaggctgaggcatgagaatcacttgaactcgggaggtagaggttgcagtgagctgagatcgcgccaatgcactccagactgggtgacagagcgagactctgtctcaaaaaaaaaaaaaaaagaaagaaaaagaaaaggtgtgtggacacctcacaagacagagccccagagccctacatcattacttcaaggcctctgactgttttcttttgaaactctctgtctctctctctctctgagtgctccgttaatattttgttggaggaacaaaaacagcagggtcagcctcctcagggggtgaaataagctctgtctggtgcagcctggttctggccacggagacccaccctcccctcagcctggctccagaggaaggagcaccagtggggatagacccaccccactgtcgggggagcagagactggcagcaggcctgcctctgaggcccccgcgggagccgtgctgtcacctcgaccccgctgtcacgggggacagagctgaggcctgcgctcccagcgccggtgtctgcaggcacacaggtcaccctgactccacaaagtcagccctgcagcctccagacggtcagacttgctgagctaggacggccactgcgtcccatgtggcttgttttcccagaccctgagctgcctcgggcatggctgtgtgacgggtgtggagattcacagagcaccctattctctgagggtcactttggtccagggtctcctcccctaggcactgctgaggcactggggctggagtgttctctcgggcggggctgtgctgggcactgcagggtactgagcagcatccctggcctgcacccactccatgccaggagccctcgccccgccccccacaagttgtgacaaccacaatgtcccagactttaccaggtgtcccctgggggacagaatcatccaccattgacaccccctgggttacagattccaaggaccacccctcccacaaagagacggcgtcccatgatcctctgccctgctgaggtcccaggaggctgcacatattgatatccccaccctgagtggggagggagagagggggtgaatcccaggagctgggggtccccctgattttgggagtttattctggtgtctggtgtgagcagggagcagactcgatatttttccaaataattaaagcagggtctctcccccttggaattcaaggatggatcgttctctgtggtcaccctgggcacggcagggtgctgagcagcatccttggcctccacccagtccatgccaggagctgcccctctcttaactgtgacgaccacaaatcagtacccaactatgtttaaaactctccagctgatctcagacaacccaccttccaccaactcccagcagctcaggagcctttctgatgaccaccctggcagttgcaggaaggccgaggaccaccccggatccccctggacaccggtggctctgagcctcgacctggccagcaccagccaaaaggaccaaccctccaagtgctgacgaacgaggtgaatgaggctcaaggtgacgttgtccggcctgccttctgcctcacacgcttcccccagcttcagccgcctccccgagacccgagagctggggaggagccaggcaggggaacgttcgtcctggctgagctccgaggccatgtccaggggtcatgaatttgaggtcagccctgaggcgggaaggtgacgggtagcatgcggagccccagagagacaacacctggcccattcaaagggcatcaggcaccgctcctgccccagtgggtgtgaagcccaatgtcatcagctcctccaactactctgagaagctgggagatgttctattgtaaaatctcctgatttttagtttcattttattttattttatttttttttaagatggagtctctgggaggccgaggcgggtggatcacgaggtcagcagatcgagaccatcctggctaacacagtgaaacctcgtctctactaaaaatacaaaaaattagccgggcgtggcagtgggcacctgtagtcccagctactcgggaggctgaggcaggagaatggcatgaacccgggaggtggagcttgcagtgagccgagattgcgtcactgccctccagcctgggtgacagagtgagactccgtctcaaaaaaaaaaaaaaaaaaagatggagtctcgctctctcacccagtggcgcagtctcagctcactgcaactgctgcctgccaggttcaagcaattctcctgcctcagcctcccgagtagctgggaccacaggcacctgccaccatacccagctaattgtattttcagtagagacagggttttgccatgtgggccaggctaacctcaagtcatcctcctgcctcagcctcccaaagcactgggattgcaggcgtgagccactgcacctggcctatttttaaatattttgtagagatggggtctcactgtgttgcccagggtggtctagaactcccagcctcaagcaatcctcctgcttcagcctcccaaagtgttggaattacaggtgtgacgcccgatttttttttttttcttttgagacagagtctcactctgtcatccaggctggagtgcagtggtgcgatctcagctcgctgcaaaccctgcctcccatgttgaagcaattctcctgcctcagcctcctgagtagctgggattacaagtgtgtgtcaccacaccggctaatttttgtatttttagtagagatagggtttcaccatgttggccagcttggtctcaaactcctggcctcaagtgatttgcccgcctcgacctcccaaagtgctgggattacaggtgtgagccaccgcgcctggtctgtgacccctgatttttaaatgctggcaataattcaaagtttaaagccactgggttctaccttggccaggtgaccaatgtcaacaccaccagtgtggacgtcacgtgcccctgatgtgttctccccagagccctgaaccccagactattcaagagcaaacatcatggaaactcacgttgggggacattttacaaaactcctgacgagtcctcctcaaaaccactaggttggccgggtgcggtggttcatgcctgtaatcccagcactttgggaggccgaggcgggcagatcacaaggtcaggagatcgagaccatcctggctaacacggtgaaaccccgtctctactaaacaatacaaaaaattagctgggcgtggcagcgggcgcctgtagtcccagctactcaggagggtgagccaggagaatggccgtgaacccgggaggcggagcttgcagcgagctgagatagcaccactgcactccagcctgggtgacagagcgagattccatctcaaaaaaaaaacaaaacaaaacaaaacaaaacaaaaaaaaacccagcaggtcatcaaaaccaatgagtctgagaagtgtcccagcagagtgtaaggagatgtcgggagtcaatggcatgtgggttcctggaaaaaacaagaaaatggaaataaagaccgggcgccgtggctcacgcctgtaatcccagcactttgggaggccgaggcgggcggctcacctgaggtcaggaattcgagaccagcctggccaacatggtgaacccctgcctctattaaaaatacaaaaattagccgtgcagggtggcaggcacctgaaatcccagctacttgggaggctgaggcaggaggatcatttgaacccaggaggtggaggttgcagtgagccaagatcacaccactggcactccagcctgggtgaaagagcgagactccatctaaaaaaaaaaaaaaagaaagaaagaaagaaagaaaaataaaatgtaaataaagtgtggagttgagttcgtgataatgtatggatactggtctttttagaaaatttctttctttctttttttagagagagggccttgtactgcttttgtatattttaaacatacaattgtgtatatttccaatatatttcagagttttcttaggatacatttgtgataatttgttacacagaattagctaactaatataggctgtttccaaaattcaaaactaccctaaaagaaatctgaggccagggaccgtggctcacgcctgtaatcccagcactttgggaggccaaggtgggcggatcacccaaggtcaggagtttgagaccagcctggccaacgtggtgaaaccccatctccactaaaaatataaaaactagccaggtgtagtggcaccttgcctataatcccagctactccagaggctgaggcaaaagaattgcctgaacctgggagccagaggttgcggtgagccgagatcaccccactgcactctagcctgagcaacagagtgagactccatctcaaaaacaaaacaaacaagaaaaaagaatctgaaatataatggaaatacacacaattgtatgtttgaaatatacaaaagcagtacaatccactcttgaagggaatcagaatcgtcacactgctgggaaaagggcaaggtctccaaaggtgactggtgtttttgttttttgtttttgttttgtttttttttgagacagagtcttgttccgttgcctaggctggagtgcagtggtgcaatctcagctcgctgcaacctccacctcctgggctcaagcgatcctcctgcctcaacctcccaagtagctgggattacaggcgcccacaaccatgcccggctaatttttgcatttttagtagagacgagtttttaccatgttggccaggctggtctcgaactcctgacctcaggtgatccacccgccttggcctcccacagtgctgggattacaggcgtgagctactgcgtctggcctgcaaggtgactgttttaaaacacagaggacacctgctgagatgcaaagtcagggagtgttgaagaaaacagagatctccttatgtgatggtcgtaactcgcatttccaccctcgacagcgccgactccatcgggcagcttttctacatagtcaagtttgaaaactgtgccattgtacgtcaccagaaacggactcggttagaaaacaatgctctttcgtaatgtataccgtactacttttcctaaaacggaactgtcataacgcctccccctctggctgagactagaatagataaaaatccagattttcacacactcgggactggtaatgttttaacacatggaaaacgcgacagggttacagactgctttagcttctccaaacaaatccgcaacggcgccaagcactcctaacagttggacgtgttcataaatgaacccaaacagatcacgttctcggagacggatgcacgccagaaattcctgtcgtgcccctgaagaactaacaggtctctctctgcaacggtggacgactggtcaaaccctggaaccagccaggaacagcagcaagtgcacgggctcgggaatgggaatctggctttatggaacctccaggctcaaggggacaccaggaagggacagcttcgtgaccaagcccggtgtgacccaccaaaaatctgcaaccacgaagaccaggaaatgccagcagtgccgagcaggagaggtcgcttgacggtaaagaagcagggagcgttatttagcaaaccaggctggttaaagagtagagaatatcagatgtcgcggcccctctgcagaggacagttctgaaggacagcgatgacctaaattggctcctatgagggactgctgggggaaatatttccccaggatcctataagatacaaagaaaaacatatgaaaacagaaaagatattcccgacacttgggggtctcaatggggcgggggaggtctgaggacatctgtggttttcacgattggggggagctcctggtatggagtgggtggaggccagggacactgctcagcaccctgcagtgcccaggatggcccctccccagagaatgatccagccccaatgtccacagcaccagggggaagagactcaaagttaattatttggaagaaaatattgttgagccagatgcctcagaatgggaccttatttggaaacagggtttctgcagatggacttattattaagatgtggttgtgctggattaagatgagccctaaatccaataactgatgtccttataagacgagggaaatttggacacagacccacacagggaagggggccgtgtgaggatggaggcagagactggagcgatgtcaccagcccaggggcgccaagaaccgccggccacttgccagatgctggaagaggcaggaaggatcctccccgggagcttctgggccgggaacggccctgcccacaccttcgtctcagacttctggcttctagaactgccagaaaatccatttctgtggttttgagccatgcaggttgaagtcattttccatgggcgccctcaaatatccaaacttcaccccacagagaccctcccctaggcacccacatcctggcatgttcagacaccctcctcgtgaacatgcacagcccccaaggcaccagatagacattgatttccatctagaagtgtccgtcaaaccctcagcgatatatctctgccgcccaggctagagtgcagtggcacagtctcagctcactgcaacctccaccgcctggctcaagcgatcctcccacctcagcctcccaaggaactgggaccacaggcgcgcaccatcatgcttgcctaatttttgttttcgctttctgtagagatggggtttcaccatgttgcccaagctggtgtcaaactcccagattcaagtgatcctcccgcctcggcctcccatagtcctgggattacaggtgtgaggcatcgcgcccagcctctttggtggttttcaggaacagctagttagttattctgcagatggaggttcaggagcttgcaccacttcctagacccggctggaggagttgggtgtaattttcagccgggcgggtgcaagactcaaagagatgtgtggcagagagaagctgttcagacagcttctggggttgccaggaagaaacaagccacttgctccgatctgcacattccctccctgtccagggctgatttccacccaggcaggactcccgattcccagagaatctcaaagcaaggcattctcctggccgtgatccggctctcagctctaaagggactccatatctttactgcagacccaaatctgtgtcaccacagaggaaaaacggccgcttaattacacttgcatatatgctcgcaagaattcttccagggagcaggatctgggaacgtcctctggagacagggccttccaggagacgctgagctcggtgttggagcatggaggctgaatctaatccatcaacaggatgccacaggggagcagagaattccatttttttttttttgcttcaattcctttctatacaaccgtggttctcaaccaggggtccttctggtccccaggggatgctaggtggtgtctgggggcatttgtgactgttatgactcagggatgctcctggcgtggagtgggtggaggccagggatgctgatcagaaccttgcagtggccaggacaaccccaccccagagaacgacccagccctgaatgccaagggggagagactctgccttaattatttggaaaaatattgtatctgctccctgttgacaccagacactagaaaaaattcccgatggggtggatggcagaaaccaaggggggccccagctcctgcgattctcctcctctctccctccccactcagggtgtggattacaatgtgtgcagcctcctggaacctcaggaggacagaggatcatgagacacagagtttcttggggatctgtggaatcccctaacccccgggggtctcacctgggggtgattctgccccccatggggcactgggcaatgtctggggacatctttggttgtcacaactcggggtgtccctggcatagagtgggtggaggccagggacgctgctcagcaccctacagtgcccaggatggccccacctcagagaacgatctggccccaaggtccacagtgacagagagtgataaccgctgccataatctataggactgaccatagccacatgcatatggtcacacaaacatgagtgtgactgtccctctgactcaaaggacaaagccagtcccaacctttctaaccctgccacctgtgctgaccaccagtggcctctgtgtggatgttagttagggttcagcagccttaggaaaacagaacaccaggcatccagaccttccactgtggccctgagtggaagaggaggtggcggtggccgacgccaacactgtcacagcaagaaacaagagagtgggtgtgactgtggtcacttccatctcagggcacatgctacattgaggaagtaaaacctggggggagcgagatatacaagaagtgaaaggtgacttgtagaatgttctggaatcttccagaagcttctggaaacttccagaattttctgaaatatagtaggtattgtggcatagcaaggctttggattcagaagctgctgggcttgggcacggagtcaaaaaagtaacagaggaaaagccacggaatgcaaacttccagggatgacatggttgccacacagtgggcaggtgggtcacacccactgtacacaggtcacacttggctctttgaactcagtcacctattatgggtggaggaaccaaatcctgggatggggtaataaatgcatacggtttcagtttccccatccacaacacagggagaagaatcagataaggtgtccagtctcggagggtcctgggcagcaggcagcgcctccaagatcatcacctccaaccctgattctgccaagccccagcctggtaactacttctctcaaggggtcccagctctcagagctaggagtggccttcaacgccaggtctacaccccatgccaacagaatcccttccctgacctttgcaccagccaacccatcctccgtcatgcagccttcgacgatcggaaaccaacagcttctcatgacggtccctccgatttccagacaagcctgattcttaagccagcccagccaagctacagctcctatcccatctccccaagaacagacttcatcgttttctgaatttggtccacgcccatggtgtccgtgaggaaaaataacaacataagtaacatatagtacaatgctaattttttgagacgggatcttgctgttgcccaggctggaatgcagtggtgcaatcatagctcactgcagcctcaacttcctaggcttccaagcaatcctcctgcctcagcctcccaagcagctgggaccacaggtgtgcaccaccatatctggctaatttttaataaattttgtagagatagagtctcactatgttgctcaggctggtctcgaactccagggctcaagcaatcctcccacctaagcctcccaaagtgctggaattacaggtgtgagccaccacacccagccaatactaatatttatacataatatattgaataatattagcagtgattccagcaataacagtgataaccaggaccaccacccatccaggtcacagcctcgtagtccatcccaatcttttcaatgaccctagggagtgattcctatcctgtctgacacacaaggaaacagaaaggttccatgttttcttcaaaattcacacagaaagaaagtcacatggtggctaagtaggcattctaaatccaatgcctcaccatgcctacattccagaaaactctagaaggctctgggagtttctagaaggttccagaagattccagaaccctccatgattcgccacctttcactttttacatatcctattcccccaggtcccacttcctcaaagcaggacagaattttcaaccccttgcattcccatctgcatcttcaccttactcattgtattaactccaggcaccaggtagcaccttcctaaattacctgggcttggcaagacctaaatcaaagacatgacctgctcagtagtcccagatgtgaagaaactcaaaatccaatgccagaatcccttaaaacagaaccagtcagtgtccacagctctattaggcttgacccacagtggagaaagatgagaaacccacagggagaaaaacaggaccgtcttcttacagtctaagactgtcagccaggcacggcagctcacgcctgtaaccccagcatcttgggagaccgaggagggaggatcgcttaagcccaggagttcgagcagcctgggcatcatagtaagaccttgtctctttttttttttttttttttttgagacagagtctcgctctgttgcccaggctggagtgcagttgtgcgatctcggctcaccacaacctccacctcccaggttcaagtgattctctctgccttagcctccccgagtaactgggataacaggcacccgccaccatgcctggccaattttagtatttttagtagagatgtggtttcaccatcttggccaggctggtctcaaactcctgacctcaggtgatccacccgcctcggtctcccaaagtgctgggattacaggcatgagccaccttgcccagccacctgtctctattttttaaaaaattaaaacattttaaaattaaaaattaaaagctctgaaaagtgaccacatagactaacagtgggttttttagtaaaatacacttaacacaaaatttacaatttttttttttttttttttttgagatggagtttccctcttgttgcccaggctggaatgcaatggtgagatctcagcccactgcaacctccgcctcctgggttcaagagattctcctgcctcagcctcctaagtagctaggattacaggcatgcatcaccacgcctggctaattttgtattttagtagaggcggggtttctccatgttggtcaggctggtcttgaactcccgacttcattcgtttcttttttgagacagggtcttgctctgttgctcaggctggagtgcggtggtgtgatcacagctcactgcaaccttcgtctcccgagctcgcatgagggtccccatgtcctacctccccgtgagcccttgtgattgtttgttgttctggttttttaattctagccatcttactgggcgtgaagtggtatctcaccatggctctgatttgcatttccctgaggactgacgcggagcatgttttgaagtgaaaccgacagtttttgtttctttgatcctcctgtgtaaccctcccaagtagctgggactacaggtgtgccccagcaggcctggctaatttttatttttattttttttgtagcaaccaactttttttattttattgtttttgagacggagtcttgctctgttgcccaggctggaatgcagtggcacgatctcggctcactgcaacctccacctcccaggttcaagcgattctcctgcctcagcctcccgagtagctgggactacaggcgcccgccaccacgcccggctaattttttgtccttttagtagagatggggtttcaccatattagtcaggatggcttcgatctcctgacctcatgatccgcccgcctcggcctcccaaagtgctgggattgcaggcgtgagcaacctcacccagccggtctccaactcttggactcaagtgatcctcccacctcggcctcccaaagcgctgggatcactagcattagccacatcaccgggccagatccttcttgcgcagtgtttgtgtggacatacgctttcacttcccttaggtgtacgtctaggagtcaactcacagggtcatatggaaacactgtatgtaaccacttcaggaactgccaggctgtttccagagcagctgtaccacatgatgttcccagcagcgacgcatgaggatccccgtgtctctacctccccgtgagcccttgtgattgtttgttgttttggtttttttaattctagccatcctactgggtgtgaagtggtatctcaccatggctttgatttgcatttccctgaggactgatgcggagcatgttttcaagtgaaactgatagtttctgtttctttgtttttgtttgagatggagtcttgctctgttgcccaggctggagtgcagtggcgcaatctcagctcactgcaacctccgcctcccaggttcaagggattctcctgcctcagcctcccaagtagctgggattacaggcgcgcgccaccacgcccggctaattttgtatttttagcagagactgggtttcactatgttggccaggctggtcttgaactcctcacctcaggtgatccacccaccttggcctcccaaagtgctgtgattacaggcgtgagccaccgcgcccggcctgaagctgatagtttttaacatgaggggtcctggtataatcaactccacagctagaaggaagccggagttttacctggaaaaatgtgcaaggaaacgtggctggttccatcacggagatgaaagagtttgtgcaaaatgcagacagagccatctcataaaagagctacagggcgagctgggcacggaggctcacacctgtcatcccagcatttcgggaggccaaggcgggcggatcacgaggtcaggagttcgagaccagcctggccaacatagcgaaaccccgtctctactagaaatacaaaaattggccaggcgtggtggcacgcacctgtagtcccagctactcaggaggctgaggcaggagaatcacttgaacccgggagacggaggttgcagagatcacaccactgcactccagcctgggcaacagggcgagactccatctcaaaaaaaaaaaaaaaaaaaaaaaaagaagagctacagggaggcaggggtcatccctgcccctgctcccaccccatccggtgaagtctcccactccacgccatgagccttggtttcctcatctgaagacagagcctcagaagagctgccaggggttgctctgggggtaactgcaatgctggggtgaggggcaatcggaaacctgcagctgcaactgtaggagtgagggaggcattcaaataacagtctactgcattctagaagattccatcctgggctcactgaataaggactcccggcaggacacggtggctcacgcctgtaatcccagcactttgggagtccgaggcgggcagatcacgaggtcaggagatcgagaccagcctggccaacgtggtgaaaccccatctctttaaattttgtaaaaatacaaaaattagctgggcgtgctggcgcatgcctgtaatcccagctactcgggacgctgaggcacgagaatcgcttgaacccgggaggcagaggttgcagtgagccgagattgtgccactgcactccagcctgggcgacagagaaagactccgtctcaaaaaaaaaaaatagagatgggttctcactatgttgccctaggccagcctgggtgggaggccaggctggtctcgaactcctgacctcaggtgatgtgcctgcctcggctcccaaaatgctgggattacaggtgtgagccaccactcccggccaagacccgcatctctaatttttttaaaaagactattttccccggaatacctgctagatactctccacgccttctgtgtggtcttcttacctgctcttgaggtaggagcctcttctacagataaagccaacaaacaaaaacgatgctcaggccaaagaagaagatgcaggctctgataaagactggcagtggggaggcgggtgggagcccggaaacttcaaggtgtcactgaagcacaaggtgacatcagacagggagaagaaacaggggagctggagcaggcggagatggtgaaagcctgaaccgagggcattccaggtgaggagaaaaacaagagagagaccctggaggaggagggagggaaattaactgagctgtgaaaaacctgcctggggctgaccggctcttgcacagggacgggccagctcgggcagggacgggcttgctgccgggaggtacccgtgcagaaacaagaaaggagctcctgcaggggctggctagggagctggtggacagcatcggccagaggagctcaaatccgccctcagccccagggggccgagctgcaaaagcgacgtcaaatggacaaaaatcccaccgggcacagaagtgcgaccagcaagtctatgggtttaaaaataaatgatggggccgggcgcggtggctcacgcctgtaatcgcagcacttggagaggctgaagccaggtggctcacttgaggtcaggagttcgagaccagcctggccatttttttttttttttttttgagatggagtctcactctgtcgcccaggctggagtgcaatggtgcgatctcggctcactgcaagctcctcctcctgggttcaagcaattctcctgcctcagcctcgcgagtagctgggattacaggggtccgccaccacgcccggataatttttgtatttttagtagagacggggtttcaccatgttggccaggatggtctcgatctcttgacctcgtgatccgcctgcctcaggctcccaaagtgctgggatgacaggcgtgagccaccgtgcccggcccgcaccagtgctgttgatggaggccccaaagtggtagcgacacaagtgaccctggacggatgcacggatcaacgtagcgtggtccatacacaccccggagtatgattcagccttcaacagcaggcaatcctgacacaggccacgatgaggatgcactttgaggacctcagtctcagtgagagaagccaggcacagaaggacacatcctccgtgatccactcctaagaggttcccagagccctcagattcacagagacggaaagtaggatgggggccgggcacagtggctcatgcctgtaatcccagcactttgggaggccgaggcgggtggatcacctgaggtcaggagttcacgaccagcctggccaacatggaaaaacctcgtctctactaaaaatacaaaaattggacgggcgcagtggctcacgcctgtaatcccaacactctgggaggccgaggcgggtggatcacctgaggtcaggagttcaacaccagcctggccaacatggagaaaccttgtctctactaaaaatacaaaaattagacaggcgtggcggcacacgcctgtaatcccagctactcaggaggctgacgcaggagaatcgcttgaacccaggaggcagaggttgcagtgagccaagatcgcacgactgcactccagcctgggtgacaagagcgagactctgtctaaaaaaaaaaaagaaagaaaaaagaaaataaagtaggatgggagtgccaggggctggggagggggctggggagtctgtgcttcatgaggacacagtttcagtttgggaagatgagaaagttctggaggggacagtggttggttaaatgtacccaaaaaatggttaaacggggaaattttatgttacatgtaatttaccacaatgaaaaatgaagagaaggctgggtgcagtgggtcacacctgtaatctcagcactttgggaggccgaggctgaaggatagcttgagcctaggggttggagaccagcctggccaatatagcaagaccccatctctacaaaaaaatttaaaaatcagccgggcgtggtggcatgcacctgtggtcccagctacttgggaggttgagacaggaggatggctggaacccaggaggcagaggctgcagggagctgtgatcgcaccactgcactccagcctgggtgacagagggagaccctgtctcaaagtaaagtaagggaagcaaaacaaaagaaagtgagagaggggaagcagctgagagtcagagacgggggacagggtgggaagtcacgaggccccgtccactgtgtgtcaaacgtcggatgcccagtaacgtccgtgaccgcccggtgtcctcctcccgagacgagggcctggtgggcaggggacggccttgaacacccagcgacaccctgccgttgtttgcccagtgaaaagaggccactaagaaaagggccttggcaaaacaaagggccccattcactgtccccgcgagaggaggcctgagctctttctcgccagagctctcctgtcccggcccagtttcactttccaaggacactccaaccccacctcagcccccaccgatatcctgctttccaacaatcctctgcctttaccagacacttcatcagagcgagaatgtggacccaggggtgtcatcttggtcccagaggccagggggcagaaagtgccagctgtcaggcagtttcccagccgtgtgtggtctctgtctcagcatttttttttttttttgagacagagtctcacgctgtcgcccaggctggagtgcagtggtgcgatctcagctcactgcaacctccgccacccgcgttcaagcgattctcctgcctcagcctcccgagtagctgggattacaggcacccgccaccacgcctggctaattcttgtatttttagtagagacggggtttcaccacattggccaggctggtctccaactactggcctcaggtgatccacccacctcggcctcccaaagtgctgggattataggcgtgagccaccgtacccggcctcccccctcctttttaaaaatgttgcatctcaggcaaagctgcgctcaacaccccggcccggtgcctgcttgcttcagtctccagcactgggatcccggccaatccccgcaacacattcgggaccggcaggacgcatatgtctccaatcagaagggagatgtctctcctgagctctcttcagtgtttgccgccaagatggggaagacgacgagtttccaacaccctgaaacgatcccaaggagcggagcctttgtagggtggggtcaaaagagactttacttactttttttctttcttttttttttttttttgagacagagtctcgctctctcgcccagggtggagtacagtggcacgatctcggctcactgcaagctctgcctcccaggttcacaccattcccctgcctcagcctcctgagtagctgggactacaggcgcccgccaccacatccagctaactttttgtattttttagtagagacggggtttcaccgtgttagccaggatggtctcgatctcctgacctcgtgatccgcccgcctcggcctcccaaagtgctgggattacaggcgtgagccaccgcgcctggccactttttttcttttttttttttttgagacaaggtctggctctgtcacccacactggagtgcaggggcatgatcttggctcactgcagcctcaacttcctgggctcaagcgaccctcctgcctcggactcccgagtagctgggattacaggcatgcgccactatactcagttaatttttttctcttttttgtagagatggtgtcttactatgttgtccaggctggtctcaagctcctgggctcaagcaatcctctcatcttggcctcccaaagtgctggggttaggctgggcatggtggctcacacctgtaatgccagcactttgggaggccgaggcgggtggatcacctgaggtcaggagttcgagaccagcctggccaacatggagaaaccctgcctctactaaaaatacaaaattagccaggcatggtggcccatgcctgtaatcccagctagttgggaggttgaggtaggagaatcgcttgagcccgggaggcagaggttgcggtgagccgagatcgcaccattgcactccagcctgggcaacaagagtgaaactccatctcaaaaaacaaacaaacaaaaaaaagtgctggcatgacaggagtaagccaccagcctggccaagaagtttaaatcatgatgccgggcgcggtggctcacgcctgtaattccagcactttgggaggccgaggcaggcagatcacatggtcaggagttcgagaccagcctggccaacacggcgaaaccccatctctactaaaaatacaaaaaattagccgggcaaggtggcacgcacctgtaatcccaactatttgggaggctgaggcaggagaatcagttgaacctgagtgagctgagatcgtgccactgtactccaacctgggcaacaagaacaaaactctgcctccagataaaatagccgggcgcggtggctcacgcctgtaatcccagcactttgggaggccgagctgggcagatcacaaggtcaggagatcgagactatcctggctaacacggtgaaaccccgtccctactaaaaataacaaaaaattagccgggcatggtggcgggtgcctgtagtcccagttactcgggaggctgaggcaggagaatggtgtaaacccaggaggtggagcttgcagtgagccaagatcgcgccactgcactccagcctgggcgacagagcgagactccgtctcaacaaaagaaaaaagaaatcatgatgcaaagatgaaaagcaaagtttgccgtacgaaggatggagtcggtgtcagtgctctggggaagtggggagttccctcagcaagaatgacctcagagtagctggtaggtgggctaaggccacctgggctgggagaaccaggttaacagcaccagtaggaagtcaccagggtctcaaggatccccagcagggagagagcaacagggcacctcacccctacgtgttctttcccgaaacccgtaaccccggtctgatcacgagagaaatatctgacaaacctagatcagaagtaagtctgcacaatacccagccggtccccctaagaccgtccaggtcacgagaggtaacgaacatctaagacatggtcccaacctggaagaacccccggagacgagccggctaaatgtcacgtgggattctagatgggtcctggggcaggaaaggacattaggggaagattaatgacatttgaataaagtgtggagttgagagaaatgaacccattgttagccgggcacagtggctcccgtctgtcctcctaacactttgggagtccggggtggcaggatcacttgtgttcaggagttcgagaccagcctaggcaaaatagcgagacctcatctctacaataaaacaaaaattagccaggcacggggttgcgtgcctgtggtcccagctactcaggaggctgaggtgggaggatcgcttgagcccaggagttggaggctacagtgagccatgatcactccactgcacttagcctgggcgacagagtaagactctgtctcaaaaaaaaatgtaaatgtaaatttaaaaaatattacttttaatggcaaagaccacaattatgtttgccccaacataataaatacatacaataaataaataaataagaaaaaaataaacaaaaataaaaataatgcaaaaaaaaagggggaaaaaaatgccaatcatactatgcatggcaccgtgttataggggaaaaaaaataattatataaaattgttcccaaatcattaagcccttctcattatggaggctacaggaataaacgctcctaacaagaccacatttgggccgggctcggtgggcctcccagcactttgggaggccaaggcgggtggatcacctgaggtcagaagttcgagaccagcctggccatcatggtgaaaccccgtctctactaaaaatacaaaaaatagccgggtgtggtggtggacgcctgtaatcccagctactcaggaggctaaggcaggaggatcacttgaacctgggaggcggaggctgcagtgagctgagatggcgccattgcactccagcctgggctacagagtgagactccaactcaaaaaaaaaaaaaaaaaaaaaaaaaaaccatattcgatgcaattctctgaagttaactgttagagctctgacaacacagaggctgaaatgacatgacaaatgctaaagtacaaagttccaagatcaagtcccagcatgaccactaactcgtgaaacctccagacctcagttttcccatgcataaagcgtgcgagatggactcgagggccaacacgctttttcggtaagagtccagatacccagtgttttcagccttgcggtggagccactctctacggcaacgacttaactacaccatggtagcagaatacacagagcagtgtgccaataaaacattatttctggacactaaaatctgaatgccatataattgtcatgtgtcatggccttttctttgacttttgttttttgcttcttttggcggcgggtagaagcagggcttcctttgacttttttttccaaccatttaaaaatggaggccgggcacggtggctcacgtctgtaatcccagcactttgggaggccgaagcgaaaggatcacttgaggtcaggagttcgagaccagcctggccaacatggtgaaaccccatctctactaaaaatacaaaaattagccgagtgtggtgtcaggcgcttgtaatcccagctacccgggaggctgaggcaggagaatggcctgaaccgggaggcagagtttgcagtgagccgagatcacaccactgcactccaacctaggtgacagaacgagattctgtctcaaaaaataaaataaaataaaaataaaaatgggataatcattcttagcccaggggccatatataaaaccaggctgtgggccagaggtggcccaagggcggtggttactgactcctggactggacgtgctccaagccccttcctcagctgcctttctaagattctctgattacaaatccatgtgagtttttctatttcaacctgttggctcaggtctttttttttttcttcttgagacagggtcttgctctgtcgcccaggctggagtgcagtggcacaatcttggctcactgcagcctccacctcccagattcaagcaatactcccacctcagcctcctgagtatctggggttacaggcacgcaccaccacgcccaactaagctttgtattgttaataaagacggggtttcaccatgttggccaggctggtctcgaacttctgacctcaagttatccacccacctcagactcccaaactgctgggattacaggtgcgagccaccgcgcccggccagggcagtgaaactataggataccacaatggtggacacgtatccttacacccttctccaaacccgtagaatcttcaacaccaagagtaaactccaatagagactggggactctgggtgacaatgatgtgtcaacgtgggttcatccattgtgattataacgaatgtaccactgtggtacggggtgctggtaatgggggaggctgtgcctgtgggttgcagggaggtgtatgggaactttctgttcttaccgctcgattttgctgtaaacctaaaatagctctaaaaaaataaagtctatttaaaaacccaactgtatctttgtactttaatgcaataaaagaatcataaaatcattagaaatggtttcggcctggctcagtaacgcatatccgtaatcccagcactttgggaggacgggaccagaggattgcttgagctcaggagtttgagaccaacctgggcaacatggcgagaccccatctctactaaaaatggaaaaattagccagtcgtggtgttacatgcttatagtcccagctactcaggaggctgaggtgggagaatcacttgagcctgggaggcggaggttgcagtgaaccaagattgcatcactacactccggcctgggcaacagagcaagactctgtctcaaaaaaaataaaaattaaaaaaataataataaaaggaaaagagccgggcgtggtggctcacgcctgtaatcccagcactttgggaagccgaggtggaaggatcacctgaggtcaggagttcgagaccagcctggccaacatggtgaaaccccgtttctactaaaaataccaaaattagctgggcgtggtggcacacgcctgtaatcccagctactcgggaggctgaggcaggagaattgcttgaacccgggaggcggaggttgcagtgagctgagatcatgccaccgcactccagcctgggcagcagagcaagattgcatctcaaaaaaaaaaaaaaaaagaggagggaaatttccacggacacccggggagaaggccttttgtgatgacagaggcagaaattggatcaatgaggccataagccaaggactcctggagcccccagggggtgggggaggcagtacgcctccttccctggagcctctagaaggagcgcagccctgctcacaccgtgacttcagactcctggtctccagaaccatgagacaatacatttctgttattttaccacccggtctgtggtcattcatgacggcggcagccccaggctcctcctacaactgggtactgccaaggccagcgaagtccaggccttactttccgaccacattgaagccacagccgtctctgtgcccagcagactctgccaggacatctgcatttgaacttggctggattcacctcttttctttgattcctcctggctttgttgtccatcaagttagggagttttttaagaaggccaggggaggccgggcgcggtggctcacgcctgtaatcccagcactttgggaggccgaggtaggcagatcatgaggtcaggagatcgagaccatcctggctaacacggtgaaaccccatctctactaaaaatacaaaaaatcagccgggtgtggtggcgggcgtctgtagtcccagctactcgggaggctgaggcaggagaatggcgtgaacccgggaggtggagcttgcagtgagccgagatcgcgccactgcactccagcctgggcgacagagtgagactccatctcgaaaaaaaaaaaaaagaaggccaggggcagcagtcttgggcttgtcaacaaaggtcaaatgaacaatgaagtccgacgtggtggctcacacctgtaattctagaatgtgggccggctgcggtgggcgaatcacttgagcccaggagttcaagaccagcctggacaacacagcaagacccggtctctacaaaagatacaaaaattagccaggtgtggtggtacatgcttgtggtcttggccatctgggaggctgaggcaggaggatcacttgaacctgggagttcaaggctgcagtgagctgcgattgtgccactgcactccagcctgggtaacggagtaagcccctatctcattaaaaagaaaagtagatgttcagccaggcacagtggttcatgtctgtaatcccaacactttgggagtctgaagtgggtggatcacttgagctcaggggttcaagaccagcctgggcaacatagtgagactccatctctacaaaaaattagccggatatggtgacatgtgcctgtagtcccagctactctggaggctgaggcaggaggatcgcttgagcccaggagtttgagaccagtctaggcaacatagcaatatcctatctttacaaaaaaaaaaaattagctgggcatagtgatctctgcctgtattcccagctactcaggaggtcgaggtgggaggattgcttgagccagggaggtggaggttgcagtgagccaagatcacaccactgtactccagcctgggtgacagagcgagactctgcctcaaaaaaaaaaaaaaagaaagaaagaaaaaaagaaagaaaagaaaagcagactttcaactaattaacatacatcaaaggtagtctttttctactttaccatcttccaaagagtaactgtacagaaactccaaaaaggtagccatttctgcaaaccagggtctctcccctgggcactgtggacatcggagctctggactattctctggggtgcggccatcctgggcactgcagggcgctgagcagtgtccatggcatccacccactccatgccaggagcagccccggttgtgacagccacaaatgtccccagacgttgctcagtgtcccctgaaggccagaatcacccccagggacaagctctgatttagggcatggctggacatgagacagagacagcaccagataaatgcgtcaagggttaaagaatgaacgcccacattctacccacaacccccccaagtctctaatcaaatgccgcctcctcttggaggctctcagaggtcgaggtccctgtcttcattttgtaaacccatcactcgacacaatatcagacacttaatattgtgttgtgaacgttaataaatgtctgtaaaataaatgactctgaccttgaaacggcaatgtctctatgcctaagaaatcttggttgtttgaggataaaattatcttcctttctctctctggggttgggctacatttgagattgtaaggctgggtaagcacaggggatttgggtcagaaatgtcaaggctatctggaattggtgacactatttttggaggaatctacattttggggagatttttttgttgcttttttttgggggggggcagggaatagcacttaactagttcaaccatagtttttaggggaaaaaaaaaagttttagttgaaaggatctgttctaccatagcctggtatagagcagtggttctcaaccccagatgactgtggacaatgtctggggacatcggtggctgtcacaactcagagatgctcctggcgtggagtgggtggagcccagagacgctgctcagcaccctgcagtgcccaggacggccccaccccagagaacaatccggtcccccctatctgcagtactaagagggagcccctacattatttgggaaaaaaatcaagtctgcttcctgatcacactagacaccagaataaactcccaatggggcagacagtgtaaatcagggggacccccagcttctggggctcacctcctctctccctccccactcagggtgtggatttcaatgtgtgcagcctcctgggacctcagcagggcagaggatcatgggacgcggagtctcttggagtccgtggactcccctagcccaggtgtgatctgctccctgagggacactgggctatgtctggggacatctgtggttgtcacaactggaggtgctcctggcgtggagtgggtggaggccagggacgctgctcggcacctcaggacctgcagtgcccaggacagccctgccccagaaaatgaccctactcaggccatcacagggtagggttgaactcgagctcaggagttcgagaccagcctaggcaatacagggggacctccacgtttacaaaaaaaagttttaattagctgggcatggtggcgtgcatctgtagtcccagctactctgggaggctgaggtgggaggattgcttgagcccggagtttgaggctgcagtgagccaggctgagaaaatgtgtggtgagtggcatggggagacctagcgccctctgtgtacccaccaagatgggccagtctccaccaatccgttccctggcaaacttgtattctactcaaagcttcctcgtggcctcctgtctggaccttccgcagccccctctctacccccctggacgacttcttatcacccctgcacctattcagctcctagaacacacaggcccgaggcccccacctctgtgccaccctgggctcaggcccctctgacccagactgccatctccacggcccccacaccagcacacagatgcctcattcacgtggtgctcccagggcctggcaccagttctgaggcttaaaataggcacacaacgggcctttgtcggatagaggaaggaaggaaggagcgtttcagacaaaggagacagcaacagcagcgtccaggaaacccaggggcaccggggaggtggatggagccaagtgggggtggggtacttgaagggtcagagggcagggccaggccatgcaggaccctgaagaccccatgaggaactggggtgccatcatgtgggtgctgacttgataggaggcagggaagtgaccgtctgatcagtgcccaggaagcttactaggaaggtcctgctggagctggagaaaccagaggctgattcgtcacctcggagtctcccgccagggatgatgaggctctcggctcaagagggagcactgagatgggaaagaaagcagacagaaggggccgggcatgggggctcacgcctgtaatcccagcactttgggaggccgaggcgggcagatcacctgaggtcaggagttcgagaccagcctgggcaacatggtgaaaccctgtttctactaaacataaaaattatctgggtgtggtggtgcatgcctgtaatcccagctactcgggaggctgaggcaggagaatcactggaacctgggaggtggaggttgcagtgagccgagattgcaccactgcactccagcccgggagacagagcaagactccgtcaaaaaaaaagaaaagagagaaagagagagaggagagagaggggagagaggggagagagggaagagaggagagagaggagagagagaaagaaaaagaaaaaagaaagaaagagaaggagagaaagaaaaagagagagagagaaagaaagaaagaaagaaagaaagaaagaaagaaagaaagaaagaaagaaagaaaagaaagaaaagaaagaaagaaaggaaaggaagggaagaaagaaaggaaagacgaaggaagaaggaaggaaggaaggaaagaaagaaagaaagagaaagaaagaaccactaaacaaacatcccaagcttcagtgcagtggactgcctgtgcccaggaaaaagccatttacatcccagcactgtgctccattgcccaaaggcaaaagcggccgagcgtgtgttgctgaatggatggatgagcacagcccggcctgtccacgcaccggaacacgactcagccctgaaaagggtcgaggctctgacgcaggccacagcacggatgcaccttgagcatgtcacacgcagtgagagacaccagacacaaaaggccacacagtgtgtgacccatttctttgaaatgtctaggacaggccagtccagagacaggagggagaggcgtgggtgccagggctgggggagggggtggagagtccccctcatggggacaaaagattttactaggtgatggaatgtttttttgtttgtttgttttttgagacagagtctcgctctgttgcccaggctggagtgcagtgctcaccgcaacctccgcctcccaggttcaagcgattctcctgcctcagcctcctgagtagctgggattacaggcgcccggctaatttttgtatttttactagcgacagggtttcgccatgttggccagactggtctcgaactcctgacctcaactgatccacctgcttcggcctcccaaaatgctgggatcacaggaatgttctgaaaggggcttatagggatgtttgcacagctgataaacttatttaaaagatggaattgcatccttaaaaggtctgaatgttatgaagtgtaaattatacctcaatttttgtcataaaaagcagtaagacttttccttttgcgaggttcaagtaactgttcgtggaagcgtctcggagctgcccacgaaccccaccgcccatccgtgtcaggagccgatgtgggggagcaaccacacagagagagcgtggcccactcacgccgcaggatgggggaggaggaggacaggagtgacccctcgggggccgctgtgtgactgaggatgggtcagcccatctccttagctctcacactcatcggtagggtctcctgggtgacgtaaaccatgaacacttttctctaacccttaagagacagaggccaggccaaagagtgcatgtataaaaagcagtgacaagtgaagtcaagaaatgtcaacgagcggggagaggcgcccgacatcaacaaggacgcagaattgcagaaatcagccgtgaaaggacacagcggccgggcgcggtggctcacgcctgtcaccccagcactttgggaggctgaggtgggtggatgacctaaggtcaggagttcgaggccagcctggccaacatggtgagggccccgtccccccccccgcccgtctctactaaaaatacaaaaattagccgggcgtggtggcacatgcctgtaatggaagctactcgggaggctggggcaggagaatcgcttgaacccgggaggcggaggttgcaatgagacaagatggcgccactgcactccagcctgggcaatgaacgagaccacatctcaaaaacaaaagacaggccgggtgcgggggctcatgcttataatcccagcactttgggaggtcgaggcaggtggatcaccagaggtcaggagttccagaccagcctggctaacatggtgaaactccgtctctactaaaaatacaaaaattagctgggtgtggtggtgggtgcctgtagtcccagctactcgggaggctgaggcaggagaatggcttgaacccaggaggcagaggttgcagtgagccgagatcgcaccactgtactccagcccgggcaacggaatgagaccatgtctcaaaaaaaaaaggacaggccgggcgcggtggctcacgcctgtaatcccaacactttgggaggccgaggtaggtggatcacctgaggtcaggagtttgagaccagcctgggcaatatggtgaaaccccgtctctactaaaaatataaaaattagccgggtgcagtggtgtacgcccataatcccagctactcgagaggatgaggcagaagaattgcttgagccctggaggcggaggttgcagtgagccaagattgcaccattgcactccagccttggtgacagagaaagactgtgtttcaaaaaagaaaaaaaaaagaaagaaaagaaaaaaagaaagcaccagctcccaagcctatagagaccaggcacgaccttcctgtaagaaaccatgaagcatcttcaaaaatacaaatgactctggatacgattttaaagaccatcgctgcttccagatggaactgaaaaaatccgaataacaccttgaatgaagaaaggagtgttttccactactatcggtgaacaagaaaaatgcctccattcagtaaacacgaagctgaattgtctacacgtgagggtaatttgtgtttagttctctttgccttcaaacagtggggccccagggtttacgaagcatgaaacaagaacagaaaataacggtatcggtcaaaggatgttttctaaataaagctcctctgtaagatcgagacgcacctgcagaatttgagcttcgttggaagcttcacgttccaggttaaaaccaagaaagcacattgcaaacattgtcatcttccaatgcttgcaactgacaacttcaggccatcttctaaatcagtactaagtgttcaaaagccacataaaaggcccacctagaaaggagtagcctttttttttttttttttttgagacagagtctcactctgtggcccaggctggagtgcagtggtgcaatctcagctcactgcaacctctgcctcctgggttcaggtgattctcctgcctcagccccccaagtagctgggattacaggcgtgtgctaccacgcccagttagtttttgtatttttagtacagatggggtttcaccatgttggccaggatggtcttgaattcctgacctcaagtgatccacccacttcggcctcccaaagtgctgagattacaggcgtgagccaccgcacccagccataagtaggcatttctaatgttttctaaaagcagtgagaccttacttctcccctctccgaatgacagcactaaatgacttaaaagcaatcctcaattctgaatgaccccacttcctgcacatcaaaggggagatgaggtcgttaaaggagaaaataaatcagttttgtctataacaagggttccacactggagtatctctgtccctacaggacgctgggtgatatccggagacatctgtggttgtcacaatgcggggagctcctggtgtggagtgggtggaggtcagggatgctgctcggcaccctgcagtgcccagaaggccccaccccagaggacaatcagatcccaaatgtccgcagcgctgggatagagagacccagacgcaccccatgaactgaagttgtaaactcaaaatttcaagcgtataatcacagctcgatgtggttccttacggggtgcccctaatcagaatgacccaggcagccttctcttgaacaggtgcatctgttacttaacgagctttgagactctcctgccaccaggtgtgggcaaagtcttctttcttttcagttttttactcacttttaataatatggaaacaggctccatatttgagactctgtctcaacataataataataataacaataataataagacatatttttgttgttgttgcagtcctttttttttttttcctttatttttttgaggcagagtctctctctgttgcccaggctggagtgcaatggcgtgatcttggctcactgcaacctccacctcctgggttcaagcgattctcctgcttcagcctcccaagtagctgggattacaggcaaacgccactatgcccagctaatttttgatatttttagtagagacaggttttcgctatattggccaggctggtctcaaactcctgacctcaggtgatccacccgcctcggcctcccaaagcgcggggattacaggcatgagccaccacaaccagccatgcaggttattttttaaagcttctgggggtgaccctgatgtgtgctcctaaggttgcaggactagagtcaagttccagtcacttcctttcctctcctctgtgacaacccagtcatcccactcctccatctccaaacccaccaaagaaaaaaactggattgagtccattattctccatgcttcaggtaccctcactatatgctaggaaatagtccatgcatacatcccgtaattcgaccctgagaggcacatgctactgtttttattattcccgctttgcaggggagtaaacaacacctccaaaagatgatacagccaaatccgcagcgagaggctgggtcggaacacacacaggcgcacctcccagaggcccccgacactccatcaaggcaagatcgcagcatcccacgacgggaacaagtttgtgaacttggcatttgcctcgctgacacctagcaaccgtgtgaagacgcttagctggggatccgctgcctctgttcatcaagcctgtcttccaccgcccacctcccaacccctagcaacccccgctccccaggaaaaataaagtgccacccacgtcgctcaatagcaccgtcccaaaaactcccactttagttcctgaaaaattcagtcaccgacaggagcctttctccttcctgaagcgttctccttggcaccctatatcctagaaataaacctcaaaaagtattccgaactcccgtctccttcaactcactgttccccagggggttctgccccgtgcccagttctagagcaaacaattaacatctcccccaaaagtagaggggtgagtcctctccaaattccttttaactggatcctacctgagacacctccccacaccccgttttcctcctgattagtcaatgtctagcaaaacacctgcccccaggtgtctccagcctgggaccttacccccacctcccttctcactaactcaccccaacttccttctccctgaacccccttccaccccacacactcacaagctccccatttcccctgatagcccccagaccctttctggaacaagcctgacccccacctgtatgctccagccactccctggctcaccccagctttgtccttctgccccttttcagctaaccctaacccctgggccgtcaatcacacccccccatcttcaccaaccccattcctcagtcctctccccagacaacctcaacatctaattccctctgcagccccctctccaatgaaccccacttcaaactccatccccagccccctctccagctccctgcaaacctcaaccccactcccagctccctcttcaaagaagctgcacccttgactcaacccctgttccccgctccaattaacctcaacccccaacaccatccccagcgtcctccccagctaactcagatttccaattccacttccagccccctccccagctaacctcgacctacaattccagccccctccccagctagcttggacctccaatcccactccaagccccctcggcagctaacctcgacctgcgactctagccccctccccagcaaactcaagacctccaattccaccaccagccccttcctagctaacctggacctgcaattccagacccctccccagccaactcagacctccaatcccgctccaagctccctccccagctaacctcgacctgcaactccagtcccctccccagataactcagacctccagtctcacccccagccccctcctcagctaactcagacctccaatcccacctccagccccctccccagctaacctggacctgcaactccagcctcctccccagctggccctgatttctaagtggagtcccaatgcccagacccaatccttccccagctaacctcgatctgcaccccctgccccgtccccagctaacctcgacctgcaactcccgccccctccccagctagccctgagccccaagtgcagtcccaatccccaaccccagcccctccccagctaacttcgaccccctaagcgcagccccgtccccaattccaaccccagcctccagttgcagcccgggtccccagacccagcccccctcctcagccgactccgacccccaactcggtccgcagccgaatccgagctgtcccagtcccctctccgggacgccggccgcgccctcacttcccctggcccggttcgcgggcgcccttacctgcgctcgggccccgcggccgcctcagccccgccgcgcagccgaaccctccgccccggcccgcgagcgctcgctcccctctgcgggggcggggccgacactcggggggcgggccctggcgtcccggcaaggccaatcgcgagccccggctgcgggaggccggagcgggggcggggcgcggggcaggcagcggggtaggctgcgcccaggagagtggggcggggctccgggcgcgggcggggccgggggcggggcgaagagcggctttccagggtgacttcgtgacgtcaggaaggcgcgagtagtttcgcgagttcgaatcccgcgctaggtgagctggttcgaatcctgcatgccagctccgggggctcatttgctggggaagaatgtcagtgatcataactgctgcaccgctttcttgaagactttataggctccctctcgtgggaccctccgcataaggccagaaggcgagattactatccacattttacagaggtggaaactgggtctcagaaaggtgaaacctaaggtcatttgcccaagcctgtctcatcatttccaagatttctcagtttcctaactcatggccctggatccacaaattcctgagccccaacacagatggaatgaaccagaatcctatagggaactggaccctgaaatctgtgttttgtttagttttcgttttgtttttgagacagggtatcactcaattgccgtggctggactgcagtggtgcagtcatagctcactgcagctttgaagtcccaggctcaagcagtccttccacctcagccttccgggtagctggggccacaggcacgcaccaccacatccagctaatttttgtattattagtagagacagggtttcaccgttttggccaggctggtctccaactcctgacctcaggtgatccacctttcttggcctcccatagtgctgggattacaggcgtgagccaccgtgcctggccctggctaatttttttttgttagagatggggtcttgctatgttgcccaaactggtcttgaactcctgggctcaagtgattctcctgcctctgcctcccaaaatgcttggattacaggcctggaatcttcattttccacaagctcccttgggaatattggaaaacactttgtatgtctccaaaagcagtacacagccctggaaggaagatggagccaccatattctgtgacctcagggatttcatcaggcgctgacactgtgtgtccttgccgccccacctgagccctgggattggagctgctggccaaaatccaagataaacttccccagggttcctgtcatccctgcaagaacctccctgctcatcctctggactccagtggcctgccctgcagggcacagagaaacctccatctccctgcttgccctcctccaggctctccccagctggcatcccccaagaggaatgactgtctagatagagcttgggaagggcacggtggctcacgactgtattcccagcactttgggaggctgaagcgggaggatcgcttgagcccaggagttcaagaccagcctggcaacatactgagaccgcaactctacaaaaaaattaaaatattagccaggcctggcggcgcacaccagtagtcccagctacttcggaggcgaaagcaggaggatcgcttgagcttaggaggttgaggctgcagtgagctttgatcacaccactgcactccagcctgggcgatagagtgagactctgtctcaaaaaaaaaaaaaaaaagtgttaaatacacaatgcaatatgattcggccataacaaagaataaaaccctgtcatttgcagcaaaatggatgggactggaggtcattatattaagtgaaaaagtgaaataagccagacacaggaagacaaatagggcatgttgtcactgatacgtgggaaccagagagttgatctcatggaggtagagagtagaatgatcaataccagaggctggaaagttgtgtaggttgagtgggggggaaatgaaaagaggtgagttatgagtacaaacattcagttagacagaaggaatacattctaatgtttgatagcagaataggatgtattctgctatcaaatatagtattagaataaattctaatgtttgatagcagaatagggtgactgtagttagcaacaatgtattgtacatttcaaaatagttagaataatggtggcttacgcctctaatccaaacactttgggaagccaaggtaggagaatcccttgagggcaggagttcgagaccagcttgggcaacatagcgaggcttcatctctatttaattattattattattattattttcttttttgtgtgtgtgagatggaatttcgctcttgttgcccaggctggcatgcaatgacgtgacgtcagctcaccacaacctccgcctcccgggttcaagcgattctcctgcctcagcctcctgagtagctgggactacaggaacgtcccaccacgccaagcttattttttagtacagacggggtttcaccgtgttagccagaatgggctcgatctccggacctcgtgatctgcccatctcggcctcccaaagtgctgggattacaggcgcccacccggacacagtggctcacgcctgtaatcccagcactttgggaggccaaggcgggtggatcacctgaggtcaggagtttgagaccagcctgaccaacatggagaaaccccgtctctactgaaaatacaaaattagccgggtgtggtggcacatgcctgtaatcccagctactcgggaggctgaggcaggagaatggcttgaacccaggaggcagaggttgtggtgagccgaggtcgtgccattgcactccagcctgggcaacaagagcgaagttctgtctcaaaaaaaaaaaaaagctagaagagagtccttgaattgttcccaacatatagaaatgagaaatagtctaagttatgaacaccccaaatacccaaacatgatcattatatattttatgcatataacaaataccacatgtaccccatacatagatacaagtatttgtaacaattttgaaaaagtgtcatgtgaaaccatgttggagcctaagacaaatggaaaaggtggcatgtcccaatagacatattttcacatatattttcccatcaacttccctttggttttttgtttgtttgttgtttatttgttttttgtttgtttgttttgagatggagtctcactcttgtcgtcaaggctaaagtacagtgatgtgatctcggctcactgtaaactccatctcccaggttcaagctattctcctgccttagcctcccgagtagctgggcttacaggcgcccaccatcatgtccagctaacttttgtatttttaatagagacggagtttcaccatgttggccagcctggtctcaaactactgacctcaggtgatccaccaacctcggcctcccaaagtgctgggattacaggcatgagccattgcgcccggcccctttcttttgttttttgggtttttgttgttgttgatgatgatgttgtttggacacagggtcttgctctgtcgcccgggctggagtgcagtgattctatcacagctcactgcagccttgatctcccaggctcaagtaatcctcccacctcagcctcctgagaagctgggaccacagatgcatgccaccatgcctagctaatttttacattttttttttttagagatgggatcttgctatgttgcccaggctggtctcgaactcctgggctcaagtgatcctcccgcctctgccttgtttattttctttctttctttctttccttttatctgagacagggtctcactctctcatccagggttgagggcagtggctcgatcattgctcactgcagcctccaactcctgggctccagcgatcctcctgtctcggcctcctgagtagctgggactgcaggcacccattgggattacaggcttgaagccacctcacctggcccaattcccctttttcaaatttagcagtatccctggtcaaaaaaagaaacattaaaaattaaattaaaattgtaaatattgagatcactgtggattcatacgcagttgtaagacatagcatagaaggagggccagtaccctctgcccagcttcgcccaatggcaaactcttgcaaaactgcagtgaaatgtcatgaacgggatattaacattgttaagcttaagatagaggatgttggccaggcgcggtggctcacgcctgtaatcccagcactttgggaggccgaggcgggcggatcacaaggtcaggagatcgagaccagcctgaccaacatggagaaaccccgtctctactaaaaatacaaaattagccaggcgtggtggcgcatgcctgtaatcccagctactcaggaggctgaggcaggagaatcacctaaacctgggaggtggagattgcagtgagccgagatcgcatcattgtactgcagcctaggcaacaagagcaaaactccttctcaaaagaaagaaagaaacaaacaaacaaaaaaaggcagaggatgtttccatccctgcgaggatccctcctggtgccttctaagagccacacccaccttcctcccatccccaaaccccatccctaacctctgaccatcaccaatctcttcaccatttcacttatttttatcttttttttttttctgagacggagtctcaccctatcgcccaggctgaagtgcaatggcgtgatctaggctcactgcaacctccgcctcccaggttcaagctattctccagcctcagcctcctgagtagctgggattacaggcgcccaccacctggctaatttttgtattgttaatagagatggagtttcatcatgttggccagcctggtctcaaactcctgacctcaagtgctccacccgcctcagcctcccaaagtgctgggattacaggagtgagccaccgtgctaggcccctttttttttttttttgagacaaggtcttgctctgtctcccaggctggagtgcagtggcacattcacagcttacttgcagcctcaaactcctgggctcaagtgatcctcctgcctcagcctcccaagtagctgggactataagtgtgcaccaccatgtctggctagttattttgtatttttattttattttaagttctgggatacatgtgcaggctgtgcaggtttgttacataggtaaatgtgtgccatggtggtttgctgcacctatctacccatcatctatgttgttttgttttgatttgatttgtttgagacagagtctcactctgttgcccaggctggagtacagtggcgtgatctcggctcactgcagcgcctcacgggttccagcgattttcctgcctcagcctcccaagtagctgggattataggcgcctgccaccatgcctgactaatttttgtatttgtaatagaggcaaggtttcgccatgttggccaggctggtctcgaactcctgacctcaactgatttgccggccttggcctcccaaagtgctgggatgacaggcgtgagccaccttacctggccaacttttttcactttttataattatctgattcatctaggtggtggcttgtcttagtattttgttccttttgactgctaagtaatattccacaatgaggatggggcacaatttgttcaaccatccacccactgaaaaccagtgtttggctcttactaataaagctgccgttaacattcctgtaagggtttgtgtatgaacataaatcatttctctgagataaatgaccaggaccacaatcgctatgtcatatggtagctgcatgatttgttcttgaagaaactgccaaatattcttccagagagttatatattttttaatgttttcttttgagatagggtcttaccagtttgcccaggctggttttgaactcctgggctcaagtgatcctcctgccttagcctcccaaagtgctgggattacaggcatgagcctgtattttttaatggttactttttttccagaacactaaagcagttgaaagtattcaaggattgaaaagatgttgtattcaaactcacaatgtcatgtgtctttttacaatgttattattaagtttctttatgtccaaatagactttattataattttactgtcctagttttagtagaagcaaatcctactaaatcatcagtcatattttcaaaatctacttctggaaaaaatcaaccactaaaaatgcatacagatatataaaggtgctgggccgggcgcggtggctcacgccggtaatcccagcactttgggaggccaaggcaggtggatcacgagatcaagagatcgagaccagccttgccaacatggtgaaaccccatctctactaaaaatacaaaaattagctgggtgtggtggcacgcacctgtagtcccagctactcaggaggctgaggcaggagaatcgcttgaacccgggaggcggaggttgcagtgagccgagacgtgccactgcactccagcctggcaacacagcaagactccatctcaaaaaaaacaaaaagaaaagaaaagaaaaaagaaaattagatgggcacagtggcacacacctgtagtcccagctactctggaggatgaggcaggagaatcgcttgaactggaaaggaggaggttgcagtgagccgagactgcaccactgcactccagcctggacaacaaattgagacagtctcaaaaaaatagaaagatatgtaaagatgcttaaatatttggtatatgtacacatgcacacatttttccttttgcctgaggctctcaggggaaggttggatgctgtctttatttgggactttaaaattttgttcaatgcagattttttgtactcatgtcaatttttaaaaaaatattgcattaggaccaggtgcagtggctcatgcctgtaatcctagcactttgaaaggccaagatgggaggattgcttgaggctaggagttcaagaccagactggccaacatagtgagacccccatctctactaataatacaaaaaataaaaattagctgggccgtggtggtgcatgcctataatcccggctactcgggaggctgaggcaggagaattgcttgaacctggcaggtagaggttgcagtgagcagagatcatgccactgcactccagcttgggcaacagagcaagactctcaaatacatacatattgcattagtgagggtggctagcgtggctaggagggatatcacgagggagtctttggtgtcgcttaagtgtcttgtttgtgcagtggcttacacctgtcatcccagcactttgggaggccgaagcaggaagatccgttgagcccaggagttcgagaccattctgggcaacatggcaagacccccccaccatatctacaaatatatatataagaaaattagccgggcgtgctggctcactcctgcaatcccagcactttgggaggccgaggtgggcggatcacgaggtcaggagattgagaccatcctggctaacacggtgaaacccgtctctactaaaaatacaaaaaattagccgggcgtggtggcgggcgcctgtagtcccagctactcgggaggctgaggcaggagaatggcgtgaacttgggaggcggagcttgcagtgagccgagatcgcaccactgcactccagcctgggcgacagagccagaccccgtctcaaaaaaaaaagaaagaaagaaaattagccacatgtggtgacgtgcatgtgtctgtagtcccagctactcagttactcggggggcgctgaggtgggaggatcacttgagcccaagagattgaggctgcagtgagctgtgttcacaccactgcaccattccagcctgggcgacggagcaagaccctgaccaaaaaaaaaaaaaaaaagtatctcgtgacggtgtttagaggaagttatgcgtgtgataaaactgcataaaccacacacacactcacacactcagatgagtgcatgcaaatccagtgaagcttgcatccttccactgtgctggttttgaggttatactgcagttatgcaagatgtaaacatagctggggggctgggtgcagggtgcatcagacctccttgtaccttcccgtgaatcaataattattaataaataaaacgttttaaaaattgcaatgaaggccaggcacggtgtctcatgcctgtaatcccagcgctttgggaggccaaggcaggtggatcacctgaggtcagaagtttgagaccagcctggccaacatggtgaaaccccatctctattaaaaccacaaaaattagccgggcatggttgtgggcgtctgtaatcccagctactcgggaggctggggcaggagaattgtttgaagccgagatcacaccactgcactccagcctgggcgacagagcaagactccgtctcaaaaaaaaaataatttttaaaagagggtgtctcaaaacccatggtcacttggagaaatagaggagggggtcccaggcaggtgctatgctccctgcagctgcagctgggatcccaccatcttcacatctgacctggaggacatatcactaaccacggccctctcccgcctcctgggatcctggcaagccagactccaaccatacattcacattacacagatagggaagctgaggtcctgtgggttcctgcctttgtaaaatagggctcttagtgcctgtccgacctcctcagccagctgcggtaagtacacggtacagcggggccctcgaggtctcttgagggaaatgctgaaatgttcccgtaaccccctggcatccttctcgtgaaagtccaaactcttcccacagcccaccaggcactgtttgacccctgctggcgaccttcaacttcactggccaccttccctctcctccctccactcctcccagccaggcctcacctgttcctgctttgacacctttgctggtccccctgtccagtgctccgtcccaggtccccttggagctggcctctcccccgcttcccacatcagcaaacacgtcagcttctgagtcagacctcagaaggcctgggactcccagccacgtcacttttgtgatgcaggtttatcttctgcgtagggagcatgtgtctgcgatgatttgatccacttcttcatagggaatcatcgtccccagtgggttatgctctctgagcaggcagggggctctggggctggtgtctgtcactgctgtgtccccagcatcagggcaggaccaggcatagagtggtgcctcttacatactggatgaatgaatgaatgaatgaaccaatgaatacgtgaatgaatgatgtctcagctcttccttccttccagtctggtcctgaacaacgccttacctcttcaggtcagatccctgccccagcctgctctgggttaggggtgaggggtgggggctgggctggcagatgggacaagcagggaaggtcccctgacatggtttggctctctgtccccacccaaatctcatgttgaattgtagtcccgtgttggaggtagtgcctgatgggaggcgactggatcatgacggtggatcctcatgaatggatccacccctcagtcctgtctcataatagagttctcacaagatccggtatggcacctcctcccctgtgctcctgctccggccgagtgacctgcctgctcccctctgccttcccccatgaccgtaagtttcctgaggcctcccagaagcagctgctgccatgcttcctgcacaggctgtggaactatgagccaattaaacctcttttctctatcatttacctgtatcaggtatttcttttctttttgtggggcggcggggggttggacagagtttcattctcgtcacccaggctggagtgtagtggcacgatctcagctcactgcaagctccgcctcccgggttcaagtgatcctcctgcctcagcctccctagtagttgggattacagactcccgccaccacgcccagctaattttttgtatttttagtagagacagggttttgccatgtgagccaggctggtctcaaacttctggtctcaggtaatatgcccttctcggcctcccaaagtgctgggactacaggcatgagccaccgtgcccggcctgggtatttctttatagcattccaagaatggactaatacagtctcctctgccccaacgccactgggcctgcaaggaaattgtccacgttcacagaaagtccagctgggaggatgtccccagctaatgtgcacagagtgaatctggaaaccaacaccctagaaaaaagccacataaagacatctccaagcagagtcccagacgggtcctgccttgcctcccctgctgcatgtcctcaacccactccctccacctccccaccaccatcccatccttcgcttcctacacaggtcccctcctccactcttcaccccatccctcactttctacacccaccacctcctccacccttcctcccatccctcacttcctccacccatcacctcctccatccttcatcccatccctcacttcctacacccatcgcctcctccacccttcaccccatacctcacttcctacacccatcacctcctccacccttcaccccatacctcacttcctacacccaccacctcctccacccttcatcccattcctcacttcctacacccaccacctcctccacccttcatcccatccctcacttcctacacccatcacctcctccacccttcatcccatccgtcactgtctacaccgatcacctcctccacccttcatcccatccctcacttcctacacccaccacctcctccacccttaatgccatctctcacttcctacacccatcacctcctccacccttcatcccatccatcactgtctacacccatcacctcctccacccttcatcccatccctcacttcctccacgcaccacctcctccacccttcatcccatccctcacttcctacacccgtcacctcctccacccttcatcccattcctcacttcctacacccaccacctcctccacccttcatcccatccctcacttcctacacccgtcacctcctccacccttcatcccatccctcacttcctacacccaccacctcctccacccttcatcccatccctcacttcctacacccgtcacctcctccacccttcatcccatccctcacttcctacacccaccacctcctccacccttcatcccatccctcacttcctacacccgtcacctcctccacccttcatcccattcctcacttcctacacccaccacctcctccacccttcatcccattcctcacttcctacacccaccacctcctccacccttcatcccatccctcacttcctacacccatcacctcctccacccttcatcccatccctcacttcctccacccaccacctcctccacccttcaccccatccctcacttcctacacccatcacctcctccacccttcacaccatccctcacttcctacacccaccacttcctccacccttcatcccatccctcacttcctacacccaccacctcctccacccttcaccccatccctcacttcctacacccgtcacctcctccacccttcatcccatccctcacttcctacacccaccaccttctcaacccttcaccccatccctcacttcctccacccaccacctcctccacccttcatcccatccctcacttcctacacccatcacctcctccacccttcatcccatccctcacttcctacacccatcacctcctccacccttcatcccatccctcacttcctacacccatcacctccttcacccttcaccccatcctgcacctccccacccttcttgatcctttacaggcggtgagctgacaccccacgcccaccacagagacagggcgccatgctggtggggaatgcaggatccacttttttattgcaggaagactatgtctagagcgaaggctacacagaccccacgatgggggagtgggggcacccacatgcggggggagagggggcaggggcggagtcacagcaagcatggcctggcacagtccccagcaccagggatgcccaggcaggatgggccagcagccaggacaggctcgggtcccctcctattgcagatgccctctctccccagggtcgggcagggcctgaggtgggagaggcctggaggtgggcagggccccaaggagattgtgctatcagggtgtgtccctgagaaagggccgcagacccctgcccagcctcactctctccggcaccttcagaacccagaagctactgccaggacaggagaggaggcaacatcagctgctggtgggccctgggccagcccaagttttggggggacccagctctgctcagacacaatgccagctcttctgggagcccggtccacgtgctggatagcaacacacacgcacgtgtgcacactccctctctctgagtgtgtccaataaacatttgttgagtaaacactcacacgaacacagaggaaaacaaacatgcttgtaccaaatcagacacgagcaatctgttacctacatagtcccacctggccacatgactacagagacacatgtgtgcaatctctctctctctctcactgcacaaaagggcgtgcgcacacacacacgttgcttcctcacacccaataagaccaaaacctccatctcaccttccctcactaacttagctgccatgctccgagccccgctgtggagagacccacatggtacagaacaaagggcagcttccagccaacagccagcgaggaactgaggccttcagtcttgcaacagcaaggaactgaatgctgcaacaaccacatgagcttctaagaagcaaatccttccccgatcaggccttcagatgagacctctgcctggcgaatgctttgattgcagcctcctgagatcccaagtagaggacccagccaacctgcacccaggctcttgacccacagaatctatgagataataagcatgtgttgtttctggttgctacatttgtggtcatttgttacacagcagtagctgactgatacagatttggaaccgaaagtcacattgctagagtcatgttgctatagagtggaacacagatcgtgtccctcaatcaggacaaacatatttacagataaatgctctcagataaaccatatcacccactccccaaaatatagtcatgctcatacaggcacaaagattcacacagacacctcacacatatccagtcttgctgacaaccacacacaggtatctacaactacccacctctctgtataccctacaccactattacacacacagactgccacaaaaacatatcatcccagacagacacacacaggtatacacgcagatgcacttagatacaagtcacccatccgcgcaccccaggttgcacaaatacaccattccatagccacttccgtgtatgttggacacaaccctgtggggtcacacgagtgtggtgtcactcagactctctcaaaaaacacccagaacctcatggctgcaggtacactcgactccaggacgccaccttcccgggcaggccctgctctctggggcacaggtggtggggaggaagtgggtggggcagacctctgtccggggcgccctcggatcctgctggtgctggctcccatcggctgtccccccacgggggtgtaattgatgtatctctggccggggccccgggtaccccctcctgagcaccccaggtccccacccgccatgcgttgctaacgtctctgtcttggtggaagaggcgggtcccgggtgggcggtgtccgggaagcccctccacgcccatggtgcctctccagcggggcagttgtgctgtggatgtggctggtcccgggggtgggattcggggctggcaggggcactgctgcaggccctgtggttattgcctggtggcctgaggcccatcccacgggccccacaccccactgtgaagacagaggagagaggtgcgtctggaaccggaggagtgggcacagatcagaggtcacgacgggccgggtgggcttgggtgtatgttaacaccaaataggagaaaaaagaaaaaaatatctgaggccgatgtgcattttcaactcccccctcccccagaaggtcacagtgatcaaatgtgagggacaggacgcgcaggtctggctggggacaccccagggaaagagatggaaacggggaaacgcagcctcctctggtcctggtgggaacaagcagctcctcttgccagctccccatcctgttttcccatctgcaggacaagggggccacctccggctcttggttttggagggtacagacagaacaggagggtggagagagagcaggggaggaagaaaagccccagccctgcctcggggtgggcaggggcagcggaggggggggcggtggcctcggtttccccagccgaggtgtcggaggaaggatgagagaagaggaggaggccgaggagggtgtcggtgttgggggaggcagcgggggtcagtgggggtgggcggcgggcaggcgggcgttccgggctcacatgagggtgcatttgcccttgacgcggtctgtcctcttctgcttcccggagcgcttgccgtcgatgttgaggctcatgttccggcgcgtctccagcgtcagcagctcctggaagagctccttgacgttgtagttcatcttggccgaggtctccatgaaagcgcacttccactcctgggccaccgcctgcgcctcgcgcgtgtccacctcccgctgcgtctcatcgcacttgttgcccacgagcatcacggggatgtcctccacgctgcccttgatctgcacgatgagcttgtagatgggccccagctcctccagcgactgcttgctggtgacggagaacaccaggatgaaggcgtggcccttggagatggacaggcgctgcatggccgggaactggtggctgccggtggtgtctgtgatctgcagcgtgcacacgctcttgtcgcagctgatcacctgccggtaggtgtcctcgatggtggggatgtaggtgtcgcggaacgtgcccttcacgaagcgcagcaccagcgagctcttgcccacgccgcccgccccgaacaccaccacgcggtaatcgttactctgttccggcatcttccccgcggcgggtgggcggccggggccgggagggctggtgccagctgcaagaaccccagaccgagcctgtgcagagaggagggtcacacgtcaaaggccacccaggcttgaggggacagccccacgccccggggagggaggaggacatggcggcttctcagaggaggtggctgccgtgcctcctgcctcctgaaaaggcccatttgcttgtggctgactttgcagttctgtcccacaggcgggcgcacagccaacaccctttgcttacttctccctaacaaaatctggggcctgagcttccccgggggacgctgagctaggagaggcgtgggagacgccgggatgcccacgaaactccttccccgggtgtgggtgtcccttccaggctgtgccagcttccccctctcttcccagtgtggcaggggcccctggaagctagcaggcctggcttccacctctcgctccacacctgcctggctctgagaccttgccgagccatcatgccaccctgagcctgtttggtggctcaaacggtgcccgtctccaacaaccatgggtcccctgctcttccgccaacccagagatggccaatcctcatggaagccgcacatggtcgggtgtttaagatgcatatgtcagggccgcagccctaggtgtgatgaatcggtcggccagggcaacggccctgggaactcgtattttattttattcttcttatttatttatttatttttagacagagtttcgctcttgctgcccaggctggagtgcaatggcacaatcttggctcgccgcaacctccacctcccgggttcaagctattctcttgcctcagcctcccaagtagctaggattacaggcatgcaccacaaagcccggctaattttatatttttagtagaggcagggtttctccatgttggtcaggcaggtcttgaactcctgacctcaggtgatccacccacctcggcctcccaaagtgctggggttacaggcgtgagccactgcacctggccttcttattttttttaaaaccaagtcttgctctgttgcccaggttggagttcagtggtgcaatctcggctcactgcaacctctgcctcctcggttcaagcaattctcctgcctcagcctccagagtagctgggattacaggcatgcaccaccacacccggctaatttttgtattttcagtagagacggggtttcgccatgttggccaggctggtcttgaactcctgacctcaggtgctcctctcgcctcgggctcccaaagtgctgggattccaggtgtgagacaccgcatccagctggaacttgtattacagggctgctctcctcacctgccataaatgggatcctgaggctgggaatctgagaaccacaatttgcaaatcagggcactgattcccaatagccgccccagggaggaagggtcttgcagcccaggtgggacacaaaaatacaaaatccagaagctgaacgggaaaatcgccactccctaaactctaaaatcaaactatggcctggtgtgccctagcccctcccgttcaggtctgaaggatccttagaatagcacttcctgggaggggcacctcttagcccctctcttccttcttgggctcagagaggtccagcagcctgaggaggtcacacagcacagcagatcctgaaatgatggaggtgggggaagaacgctggggggagggcgggtggcttatctccagaattgatgtcctcccctccccttcctccttccaggctctggggcagcggtggggggtgggggaggggtgttccccagcaaggtggtctacagtgggagaggaggaggaaccagtttctacctgctgcactgggggtgggggtgtgtttatggggagggtccagaggttccccgggggtcagtggtttgaacctaaacaggcaaattcaagtccctaagcctccgttttctcttctgtgaaatgcgagccactgttggggcaagtaaggtgacaaggtggagaaaggccctaggcagtgccctgtacagcggagaccccgatcacaattgtgatcacagtcacaagggcttggggccggtgggcagggcacttggctgtgcctgttggttgcaaaggcaccttctggattatcaagggtaacagatttgccaggaaaagaaaagaggctgatgaaagcgccagctgacacagtccccagttgtgatgagccaggcaaacttctgggcgcctcggcaatgccaactcatgtgattggctgccgggtttgtggactacatgcatagtaatttctcggcattcggaggaggctgggggtgctggtggtgggggggaggcggcctgtgctgcagaccctgccctttcctgggtgggcgccctgagaggcgggcacgctgctgtgcagaaagacgccaccaagaccggcctggggtcctaatggccatgggttctgtggacccagatccagcctttgccttgctgcgggcactgaagctccagcccccatgagcagtactgtcctccccgctgggtctggaatccctgaccagaaaggcgcttgcactcaacagccccgaagcccacgccacttcccacctccaccgcctggggggtgcgggtggagggagggggtcgtgggcaccgaggcaggagcaggaggggctggctcaaggtcacagagcaggggggtggaggcgcacagcggggctggaagcccaccctgcttggctagactcctggggtttcccgcctgtgcggggcagcccacccccagacgtccaggcagggccaatctaccccagccctgggtccctgaagcccggctcccggccgggcacggcgtggttggtgggggcgggggtgtcaaagcaaagctcagggtcaggaaagcagagagagccgcgacccaggggtctagcgggggtcacgcctgaccaagggtggggcgggggtctgacccagggccgcctggccggtgaggggtttgatggagaaagggcctgctctagggggcccgagggcgcagaggcacagtgcggggccagcccaggggcgacccttgactcaggaggacctcagtggtggagaggaggagcccaccccggggagggggcgcggagggaggggcttggctgggcagcggggcggagggcgaagaaggcggctgcaggagggaggaggccctgcccgaggggaccaatgcggagaggggcggcggggtgggcctcggtggggcgggctcggcaggggggcgccctccgggtgggggaggggaggcggccgggagctgtccaaggtgagcgcggaggggccggccgggcccggcgggaagggacgggggacgcccggcgaggggccccggagccacgcggggaagggcccggccccaaggcccgggaggctggggccgggacaaaggagggacgcgcggcggggaggacggccggctgggggctgcgcagggaccccctccccgccccgggccgcctacctgggcccgctggtccctgcggcgccgcggccgctgctcctgcccgctccggtgtccgctggcgccgccgccccccgcccgcccgagccgccgcagtcgcgcccgcgccgtccccgcccgccgggccccgcgctccgccccgccccgccccgccccgccccgccccggggacccgcgcccacggggccggcgcgccgcccggccaaggtcaccgccgccccacgcgggacccctgcccgcgcccggggtgggagaggtcgccaggatccgggacccccgccctgccacgtagccacctgcgcgcgccctccctcggggtgggagctggggccgcttcccggggaaccccgagtgggggccaggagcccggcttgggaggagcagagtccagccgggggtggagggctttggcagaaatgcggataaagggggtgcagaacgggacccctgaggccggctggggcccggtcacacgcagggcggggaatcagaggggtgcgttgtgaaatgagtaagtcgataatcaacaatcaatgaacaggtttagaagcgggcagaggcgggagggttcaggtcaatggggtgcacctggaggcccacccatcccaggggcctgggcaggggcgggatgggggcagaagcggactcagcgctctgtagggctggttttgtggaggcggaggcagcccatggcagtcaggcctagggaggtggggggtgagcaaagggggctggcgctgctctgcagcggatgggtttgccgttttcggttaggaaaatgtttgtgttcccccaacaggaggtgtcttaggggagcactggcttttctgatgcgtctgtgtgtccacaagagaccatggttccgcctccattttggagaccgggaggccgaggttccttttggcctcatcgggcagatcccagaggagactggactttggggtctagtgaccaggccagaaggtgctctcaggggtgggtgcgggacagtcccaggccgcaaggctgtcagaggaaggcgccccttggtggagaggccaactctgggacccacaggggtctctccagagtcagagccatcagtgggtgagaggctggtctggaaggtggtgagctccccatcaccaggcctgtgagcaggtgaaccccttgggccctcagctcctggggttctccatgacccaccatttccatggccctggatgaggtgggcccatctgcctctgcggagacttggcactgcctccaagaccactcagtcccctctcctgttgccactgaggctggggcactgaggttcaagcggctttggggctcaaggagctctatttctccctgatttgaccccactccccctcctggcctccagaccccttcctccagccctccttccactctgccactcaatgctccaactgcaacatgggcctcccctgctctaacgccacccatggctcccttctcccaggccaaggtccagcttctcagcctggcatccatggcccggcctgagtgctcctggcgtgcacctccctcccaccctgaccccagccctgcgggagcacctcagagcatggcccggcccctgaccctcatctgggggtgccctcagcaggagatggagacagccctgagggcagacaaatcccagcttctgctctacatggctgcctgcagggaagtgccttctcaagcatcggttcccccatctgtgagtgacgtcactgttgcccgcctgtagggttgctgggaacacatgggcagggcgcccacctacacggggctgctgggcacccaagcactcagacggcagccctgccccttcccagtccgcctgcctgccttcgtctcctgagtgacccaccagcgtggggcagggcgtcgggccggctccctgtctcctccgggcaccagctcaggccggggcaggctgactcatgcgtaggagagtgggcagggcggtaactccacgctgcggctgctatttatagctcccaggccaggctgtgggccgcgtgagccggcgaggccaggccctgttcccctcctcgctgtccctgaggaacggggtctccacacatggcccgcggtgcccaggccacagatggcagtgagctcttccgagcacccaaactaggacagcaggagcttctcccccatggtgggccggggagcagagggttccgcctggcctttgtgagtgggggtgggtgggcgccccagctctgcctctccatggaaaggtccgtgatccaaatctcaggggccagggcacttgcacactggggcactgagcaagccggggctggcactggagtttcctgggttccctgctgcctctcatacccgagtccctctttggagagtccctcggcatcctgagaggcacagaggtgggcgaggaggactgaggccggctgcatctttgccaaagagaagaggacctgtcaacctctccagctcgcgagctgggcaggatccacaggcgtccacgttgagtccccagggtgaaacccaccggggcagtctgcatgggtcctgcaaacacaaagtgccagtgtagtgggtgctgggccctcagcagtctgtacaaggccactgtccctgctcccatctggaaactgctgctcagagaagggaagcggctcgcccacggtggcctagtgggaaagaggtcggtccggatccatcaggctctgaagccatagcccagcctgctggggatagacggccacccccttgtgatcctcttgccctgtccctggctatctgcagtcttgtcctggggacactcggccggtcctgccttacagatctcctttcagcagaacagcaagggacggcgttcatctgcaatgtccagctcctcccccggccctgcagctccacgaccgctctcctcaccctgctgccctgaccagggccacgtgggcctcactgagccccggctagcctttggagaggagggcagtggggtccggcctcagctctcttcagtggtctctggaccatgtgggcaaagccgaggttgcacatcctggcctcagggggcagagtcaccccaggggctcagccacacagttgcttttcaagtttagcatctgtcaatcaatcagtcaatcaatctaccacctatctatctatcatctatcaatcatctatctgtcatctatcaattaatctatcaatcatcatttattaatcatttacctattatctatcaatcatctgtcacctgttcatctattatctattaatcatctacttatctatctatctatcgagacagggtctcactccgccacctaagctggagtgcgtggtgaggtcgcagatcactgcagccttgactttctgggctcgagcaatccttcctcctcagccgcctgagtagctgggactacaggcacacaccaccaggcccggctaattttaaaaaatttttctcggccgggcacgatggctcatgcctgtaatccctgcactttgggaggctgaggtgggtggatcacacgaggtcaggagttcaagaccagcctggccaacatggtaaaaccccgtctctactaaaattataaaaaatgagcccaatgtggtgacatgcacctgtaatcccagctacttgggaggctgaggcaggataatcacttgaacttgggaggcggaggttgcagtgagctgagatcacaccactgtactccagcctgggcaacagagcaagactctgacttaaaaaaaaaaaaaattctcgagaccatcctggctaacaaggtgaaaccccgtctctactaaaaatacaaaaaattagccgggcgcggtggcgggcgcctgtagtcccagctactcgggaggctgaggcaggagaatggcgtgaacccgggaagcggagcttgcagtgagccgagattgcgccactgcagtccgcagtccggcctgggcgacagagcgagactccgtctcaaaaaaaaaaaaaaaaaaaaaaaaaaaaaattctgggctgggcgcagtggcttacgcctgtaatcccagcactttgggaggctgaggtgggcagatcatgaggtcaggagtttgagaccagcctaaccaatatggtgaaaccccgtctctactaaaaatacaaaaattagccaggagtggtggcaggcgcctgtaaacccagctactcaggaggcccaggcaggagaatcgcttgaacccaggaggcacaggtcacagtgagccgagatcgtgctattgtactccagcctgggcgacagagcaagactctgtcccaaaagaaaaaaaaaattctgtagagataaggtcttactatactgcccaggctggtggcatcaatattttaaaatacagagaccatttgtcaaaaaccagtttgccttcaaagatgaacaggctgacatccccaagcccatttctttttcgtttgtttgtttgtttttgccctttggcatctgcagagctgctcgccgctgctcccccagcccccaggccaccatggaagacccacgcctcacgctgcctggcccctagagtcagcattgggttcctctctaacatcagggggctatgattttttgtgtttgtttttagacagagtctcgctctgtcacccagactggagtgcagtggtgtgatcttggctcactgcaacctccacctcccgggttcaagcaactcccctgcctcagcctcccaagtagctgggattacaggcgcccaccgccacacccggctaatttttatacttttagtagagatggagtttcaccatgttgcccaggctggtctggaactcctgacctcaggtgatccgtccgcctcggcctcccaaagagctgggatgacaggcgtgagccaccgcgcctggccagggtgctgtttcatcaccacctctaaggagtggggttactgaatctttagcattggcaggataaactccggtaacgcctgggtcttcttagagagaagaagccactctgatcatcagagaaaaaaggctgagaactacagaggccccagggcctttgcacatgctgctgcctcagccagatgagctctctctcccccatctccttctcactcacttcctccagtccccctcacgtcaccccagagactgctcctgaggagaccacagaactaaaatcatctccttttgctgtctctcaccgtgtcctgattcttttcagggcctttattgctacctggtaccgcctaacatgctggcgtcggctccctctccagaatgtgagccgccttagttctggggcagcagttcccacgggggggggggggggggtgattgtgtcccaaggggagactgggcactagatgggaacgtctgtggttctcacagctgtgggtgcacctggcatggagtgggtggaggccagggatactgctcagcaccctgcagtgcccaggacagccccgccccagagaactatctggccccagtgtccacagtgcccacagggagagaccctggaggggtccatgggtctcaaactttgcccaccccagcatggccagcgttgcctgggaactcggtggcatgcaagttctcaggcctcaccccagagccagggctgcagctcagcttcccacaaggcacaggatggccccagatgtccacaaagcccaggcacagaagcctgttctgggggccagctcatctagcctgagtctggctggacctccactagctgagacggaagcccagccagcccgctcacctcttcctggagaagcccgacgcagcgcccgccactccctcccctccgtgtgcagctccccggctctaaagcactcacttgtctaacccgattctcaccctacaagaccgcaaccggccatcacttctgccctccgccaggacaccgaggccagctgtgtcactgccccgaggggttgcaggtgcagagccgcagaggcctgaggggtggcagggagagaggtgggggcatcttcccactccagccccgtctggcctcagcacctgacagccaggagaagagttctggggtcttccagacaagcccccacgtcctgcagcagcctgtgctccctcgaaagggagatgactcctctaccttcaggagcctccgcctccttcccacctgcagggggaccctggaaaggctggggcagcctccgagcatcgaggtgaaggccgaggagtctttattggtgacaggctgctcaccggctgtcccaaaagcagacacagctcagggcacaagctgcgtgcaggctggcggctggaacaggtgggaggcagccccctctcttcccggtggggcagagggtccagagctgctggccaggacagtctgatggtgccaagggctgggagacaccgtcccatccaccaccgacctccccgtcccgccccgagctaataacttgtgcaacagaaatgcagacaacagacacgtagggccaacaggctgttattacggctgactcaaccccgcaggcctgggcgctgcctcatcattttctccccttttgtctccggatccaggtgagggaatccagtgatgccatccagctgtccatgctgagaacccaacgaggggcttccttcccgctggagcccacgcctgcgcccagcggggaccccgagctcaagtcccggagttaattctccagcttgcagagctgagagacgcccccatcctggcccactctctctgccccaatagaaaaacctggacccacctggggtctaggcaaggctgctgggtctgtttccggtggggcagcagctgagcctgacctgggtccctcccgcctgtgacctgcctggtcatagacaagagaagcccctggccaggcactggcctaggggtggccgtgacccagccaggagtgctgcattcggacgaagatggcactgggtgctctgcgcttggagttttggttttttgtgtgtgtttttgagaccaagtcttgctctgtcgcccaggctggagtgcagtagtgcaatctcggctcactgcaacctctgcctcccgggttcaagcgattctcctgcctcggcctcccaagttgctgggattacaggcacctgcgtccacacccagctaatttttgtatttttagtagagacggggtttcgccatgttagtcaggctggtctccaacttgtgggctcaagtaatctgcccgcctcagcctcccaaagtgctgggattataggcgtgagcccctgctccgggccggagttttgttttttaaacaggaagctgtcttgtgttatccaggaacaatctgtccaagctattcccggtctctaccagcgcatgaaacggttggcaggtgccccctctcctccctgtgtctctctcatgaacaggtggttgacatagaccaccatcacctgtcctgggtcttctgtgagttgggctgggtgtctccccctgggccctgtggacattgggactgaaccgttctcaagggtggggccgtcctgggcactgcagggtgccgagcagcatccctggcctccacccactccatgccaggagctcccctagtcaagacaaccacagatgtccccagacatggcccggtgtcccctgggggcagaagatccccggctgggagtcacagagtcagtaaaagagacccccaaggaggaggacccttggcttctgcaggtcacgtgacatttctgtgactcaaagttgtgtagagatggaggcggccatgtgcagctggagctggcctgctctgcagtgtcgtgacgtcgttttgaggcaggagtagtctgtggctgcaggcagtgacaaacccaggcttcctcaagcagtggctcctagcattgggtgacagtgtgtctgtgggcagagccagaggagacagagtcgctgggctgcctcacaggagcctggtctaggccggacccggccgccgtcggccaagggaccttgggaatgagccctgcgcctctggactctatatcggatgggcgagacgaccactccacgtctttaccccaacatggacatgtgctgggttcctcctcaaaagcgggtaaagcccccaggcgcggtggctcacgcctgtaatcccagcactgtgggaggctgaggtgggtagatcacctgagctcaagagtttgagaccagcctgaccaacacggtgaaaccccgtctctactaaaaatacaaaattagccgagcgtggtgccgggcacctatggtccctgctactcaggaggccgaggcaggagaatcacttgaatccgggagcagaggttgcagtgagccgagatcatgccactgcactccagcctgggagacagagcgaaactccatctcaaaaaaaaaaaaaaaaaagtgggccgggcacagtggctcacacgtgtaatcccagcactttgggaggccgaggccagcggatcacaaggtcaggagttcgagaccaacctggccaccatggtgaaaccccgtctctactaaaaatacaaaaattagctggccgtggtggtgcgcgcctgtaatcccagctacttgggaggctgaggcaggagaattgtttgaagccgggaggtggagattgcagtaagccgagatcgcgccactgcactccagcctgggcgacagagcgaggctctatctcaaaaaagaaaaaagagtggtgacagccgaccaaaagtggctcaagagacatccttctgccttagggtcccgctggccccaggaaagctcctttcgtgcctcctgaggactctgggacggagaggtctggaggccacagccagctcgcccccgcccccgcctacgtcctgctttctggccgctgcctctggtctgctgcagtcaaaggagcagggccagccctgagctcccacccagcgccagtgggggacaacgtggtgtcagaggctcctctagagggaaggcgaagaagccgcttgggatccttggggtggggtggctgggcctgcaggggtcgacagcttgggtccctcgggccaccctggggagctgatggctggtggagggtagggccccactttgtgcttcctgctgtgatgggcgaaggtggatggggatccctggagcagccggtgctccgccccatgtgggctcctgcgggattcgggggacagggactctgagccttcccatgtggggggcctggatgtctctatcccctggcagtcacgaaaactcaagccacatcccccaccagtgcagggacccagtggcttcacaacccacccacctgggataaaggacaaatggcccaggtggggtgaagccaggggagggacgggcagaaccacgtcaggttcaggacactgcgaagctcctatacccctggggccagggccaggctgcacagggttcagagatggatccccggtaagaggttcagacacaggttcccagaacaggccccaagcttccaacagcagtggggtaaggacctcctggagtggaagttggggggtctcaggagcagaggctgaaccccgggttacttatagaccccctaaagtggaagttggggggtctcaggagcaggggctgaaccccaggttacttacagaccccctggagtggaagttggggggtctcaggagcagaggtggaaccctgggttacgtaccgacctcctggagtggaagttggggggggtctcaggagcagaggctgaaccccaggttacttacagaccccctgaagtggaagttggcggggggtctcaggagcagaggctgaaccccagggtacttacagaccccctggagtggaagttggggggtctcaggagcagaggctgaaccccgggttacgtaccaaccccctggagtggaagttgggggggggtctcaggagcagaggtggaaccccgggttacgtaccgaccccctggagtggaagttacttacaggggctgtgtgactactccggcctcctgggacccccatggcaatgctccaggcagccaccgccctctcgaggtcgtcccttcctgtgactggcacctgggagctgagctggctgcagcagggccaccggccgggacaccccacagagcagtcactggctggccctggagctccccatctgactagattgatggactgatggataggaggccccgccaggcccaagcccacaggccagatgggcacctctccgtgcagccccccccagtcagccttgtgggtaggtgtagggaggcgtggtggcgaggcagggcacgggatgggagaagggtacctggggcctggcactcaaagatgagtgacgaggtgggaggtggggacagccagaggccctcacagccctgatggggctggaagacgccaaggcccagagatggggtccggggctccaggtcagatcaaggaaaaacccagcccaggcgggcatgcccggctcccttccgcggcgccacagcggcttcgagccaggcagagcaaaatccccgaggaaaggcgtccctccccagctctcacctccccagacccggcagggttgccgggacgacggctcaggccttccggaggttgccacagagccaggagcccagggctgccccagcccacgcccggctgctcgtcccccgtgctcctgccctctcgggagcagcgtccctgtgtccacgggagggatcgcaccgcggggcccctgccccaccgctagtggggtccatcttcctctggagaccccggtgtgtgtaagcagagctgaggactgatctttaagctgcctcctggccctgctcgtgagtctcaggaaactgtgacactcacctggcccgggggtcctggcccaggggtccccgctccaggagccacccagcaaagggaaaaggagagggcactcctgagggtacatggcccactcacagggggtacagccttgtgtggcaggagggacggagcccggctgtcccatcgcagtgactccaacctctaataagcctcaagacactcggggctcgggcggcgagatcctggcaacagagtagggtagacgttggggcctcagggcccccagctggctcctgaggcacaggcggcgcggccctcactctggccacagcagccaaatgctcccgtccttattcacaggctgggggtgtgcggcagggagaggagggtcctgaccgatctcaccgggacccaggtcctggccctcccgcccgtgggttgccacaccccacggcccgaggttgacatggccacacagctttggtaaagacttttaagagaaagaagtattttaaaaagtagcagtgctctgaggctcagggtgtaggatcgggggcacagcctggtcccgggaggccccttgtgcacaggtggtggcccagggccacagtgctcgctcttgggggacgcgcggccgggggacgcggcctgtgtccggcccggggctcccggcgggctccggcggcagggacaatggcgaggccgctcaccacttgaggaagaccatcccggccaggacggtgtagcccagcaccaggaagaggaccttgagcagacggtcactcttctcctccagctccttggccaggatctccaggaaggtgatgaagaggaaggtgccgcccgccaggccctgcagcagcacggacgccacgctgcccggcacgccctgggcgctctcaatgcccaggcccaggccgatgcccagggggatcatggcgcttacggtgaccgccagcttggccgcgtcccgcaggggcatggcactccgggccatgctgatgcccagggccacggccaccagtgtctcgtggacggccacccccacgaacaggctcaccactttctccccctcctcctgcaggcccagggccaggccctcaaagaccgagtgggccgacagcgcgaaggccaggctgagcaggcgcacggggctggcgcgcgagaggccctgcacgctcaggctggggccgtggccgtggggctccacgtacagcgcgtggccccgcgcgccccccatgaaggggctctcatactccgagtcgctgcccacgtccgatccggcgttgaaggtctccaggtcgatgaaggacggcttctccttgcggaaggtcaggatcagctgctccaggaagacggtcatgaagaagcccagcaggaggatggtttcggccagcgggtagtcggtgctgatgtggccgaggctcaggaccttctggagctgcagccggggacacccgagagagagagagagacccacgctcaggggtggcggcgacagggctggccagatgtcaccgttcaaagcaaagtccagaaatccccgattcacacagaggttaaaacaagtgggagaggaagggctcgcctgtgatgaattaacaccaccaccaccagccaagcgcggtggctcatgcctgtgaccccagcattttgggagactgaggctggcggattgcttgagcccaggagttcgagaccagcctggccaatatggggaaacatgtttctactaaaaatacaaaaattagctgggcatggtggcgagcacctgtaatcccagctactcaggaggctgaggcaggagaatggcttgaacccaggaggcagaggttgcagtgagacgagatcgtgccactgcactccagcctgggcgacagagggagactccggctcaaaataaacacataaagagctgcactggccttgcgtgttctgccgcggggcctcctctctgcttccctgaccgacatgcctgggcccgactctcctcctggtcagggctctcctagcgaggggagactttggtggggagaaactagacgtgggtcagacgggagccgcagggcgtctgcaagaggtacacactcctatgggagggacagctgctcacggggcggacacgcaggcattaggctatgcgccaggatgaaatgtctcatgaaaggcaggctgtaaacgcccacaacagctccctggagcctcgtcacggcagggccagagttcacagccaccctccagagagacctcgagaccaaagtggaggaaaatcacaacacaatcgacactcaacaatgcctgcttccctgcttccttcccagcggagacttcattacaacctgcgcacgtgcacacacacacacacacacgcatatgtgcacacacgcacgcacacacacgcgcacacgcaggtgcacacacaagcacgcgcacacagtggttctcaaccagggcgattctgcccgtgtggacacctggcaatgtctggaaacattttttattttcacaactcgggtagggggaaggtgctgacattcggggctggattgttctctgggacggggccgtcctgggcactgcagggtgctgctgagcagtgtctctggcctccacccactccaggccaggagcaccccccatcgtgacaaccacaatgtccccaggcatcgcccagtgttccctgggggcagttcacgctgggtgagcctctgctgcagcagaaggctgtgtttccacggagaagccacttaactccctcactgaccaccggctggaggcctcatgcatgcctcgcttgaggacaagctcatgaggaactctagctactcccaagagacagacgttgatcaggagagatgaggcagatgcacgggagctgtgaaccaggcaccattttccaggggtgactgagagcctggccctgcagtgggtgaggctgggggctcgggagtagggacctcatccgcctgaccagcccgaggacaggagaacggcgggaaaggtttgggtgccatgagaaggccactgtgatgagggggagggaagagcaagctccccgcagtcgcccaggcctgcagtcagagggtgacgggggtgacaccatgaccatgggggaaaaggggggctggcagtggcctctgcgatgcaggagatgtcagagatgaccaagatctccatcctcgcagtgcagatgtcagtcttcacacaccgcgtaacgaacgaatgcagactcagccacgcggaacagcaggaatgcggtgtctcggctctgaacggtggaaatccaggtgcgggctagctgggccctacgctccaggtctcgcagggtgtcatcagggctgagatctcactgacacccagggtcctcttccaagctcactggaggtcggaagagtccacctcctggtggctgtggactgaggccccgtgtcctggctggctgttggcggggatggctcttggcaccgagaggctgccctcgggtcctcgcttcatgcccttctcctggcacaccctggctttttgcttctccaaggccagcaggagggtgagtggctcacctgattaggccaggcccaccccctcccttttgatgaactcagcgctaaccgatctggggcggtcatcacagctgcaacatcccctctgctgggattctgacataatggcaggagtgacacgcacggcagtcccagccctacccacactcgaggggagggaagagcatggggcgtgcggagcaggggctggaagctcagggagccaccctggaactctactctgccacactaacaggctcagatgatttaatcccagacaacagcccttctcctcctttctggacactaggcacgaggaaaagcagggccaggggttgggggataagcttagggcttccatgctttcgttgggaggaagaacagggggtcctcatatctccaccaagtatgtaaccaacacaaattcaatgtcacatctggcactggcccagagagaggaagccactcacccagggtcacccagcaagcatggccagggctggtcacactgtggcctgacaggggacccacactctgggctgctgatatgggggagctcaaggaacaggtcagcagaggatgatgctgtcaggagttggggtggacagactccaagatggccccagaagcccctgcctcttgacagccataccctgtgaggtcctggccacttgagtatgggaaggacttgaacttgcttctaaccagcaggacactggggcagaggggaagggataccctgtcacctctgcatgacatgggactgtgccctctgtcttacacagagtcatggccatcttctccatttgctgatgaaggaactgatcatgctggggaggtccacgtggccaggctctgagggctgccccagccaacagacactgacaaacagacaccttcggtctgacaaccaatgaggaactgaacctggcttacaaccacatgagcttagaggccgacccatccccggttgaacgttgagatgagaccacagcccaggagacactgtgactgctgccttgtgagctcctgaagcagtgcccagacccctgactcacagaaactgtgagatgataaacgtctgtagtcctaaggtgctcagtttgctataatttgttacgcaacagtagctgactgatataggaaccgaagagaggccatgctttccagcttcaggacagagtgtgccctacctaggtgggtagtctggtctgattatcaggtgacaaccgacaagtccacctgttgggaatcccaggtctggtccaaaccccttgtttggccggtagagcacagagacagaaagtaaccagttcacaatcacacagcaaattcacttcctactttccgtcacccttacagcatcaaggccttcactgaacttggcatcagtgttgaaaatgcatcagagtcccttggccataaggtgccaagggctgctgctagtgcccagggagcccttaccttttccctcacagcgggcagcagagcgttgaagcacgtggccagaaacacccctcctccaaaggtgttgcagagagagaggatctttttcgagcgatgggccttctcaaaatctgtctcgatgatcttcacggggagcagggagccgagcagcatgaagaagaacacgcccaccatgcacaggattttggccactagcaatttcaccatggtggcggcttgggctgctctggtcactgcagggccaaaccatctgtgggcgcacacccaagtcccacgatgtgctaccgagcccaaccacacagttggaggctcatgtctcagtccagcaactgtgaacatcaggggcactgcattagctttctttcttttttctttttttttttttagacagagtctcgctctgttgccaggctggagtgcaatggtgcaatctccgctcactgcaacctccgcttcctggattcaagcaattctcctgcctagtagctgggattacagacacgcgccaccactcccagctaattttttttgtatttgtagtagagacgaggtttcatcatgttggccaggctggtctcgaactcctgacctcgtgatccgcctgcctcggcctcccaaagtgctaggattataggcgtgagccactgcacctggccagttcttcagttttggaactcggactggctctctttgctcctcaatctgcagacaatgtattgtgagaccctgtaatcgtgtgcaattaatacttaataaacttccctttatatatataactattccattagttctgtccctctagagaaccctgactaatacactgtctcaaaaaaagaaaaaagttcatcaaaattaaaaaaaatccaggctgggtgtagtggctcacacctgcaatcccagaactttgggaggccgaggtgggtggatcacctgaggtcaggaattcgagaccagcctggacaacatggtgaaacgccgtctctaccaaaaatacaaaaattagccggccgtggtggcaggcacctgtaatcccagctactctggaggctgaggcaagagaatcgcttgaacccaggaggcagaggttgcagtgagccaagatggcaccaccgcactccaggctgggcaacaagagcaaaactccatctcaaaaaaaaaaaaaaaaaaaaactaaataaaatacaaaattccgctcctcagtctccctggccatatttcaagcgctcagtagtcacacaagcctacttgacttctgtggttaccgtatttgacagcaaagggaacactctcatcactgcagaacatgctattggatggtggtggtccatggcttccccatgccccgaaataaagtctaaactctgtaccctgaggctgaagctctgcatgacaagctcctgcctcgcctcggccctcactggtcctttctgtgccaagcttgctcgtgcctcaggacctctgcatgggttctcctctctccacctggaacactgctctctttcccctgaccttccagcgaggcctccttcttctttcttgcttctctgcatccaggacccctcaaaagggcctccctcggttgggagtggtggctcacacctgtaatctcagcactttgggaggctgaggtgggcagatcacctgaggtcgagagttcgagaccagcacctgaggtcgagagttcaagaccagcctggccaacacagtgaaacactgtctctactaaaaatacaaaaattagctgggtgtggtagtgggcacctgtaatcccagctacttgggaggctgaggcaggagaatcacttgaacccaggaggtggaggttgcagtgagccaagatcaagccattgcactccagcctgggtgacagagtaagactctgtctcaaaaaaaaaaaaaattagctgggcatggtggtacgtgcctgtaatcccagttactcgggaggctgaggcaggagaattgcttcaacccaggaggtggagcttgcagtgagccgagatcgcgccattgtactccagcctgggctgcagagcaagactccgtctcaaaaaaaaaaaaaaaaaaaaaaaaagggcctccctctctgcccctggctgactcctgccctaaaccatatccctgtacccgccggaaggcctgctgcagaacagatactcaaaaaccgctggctgaacacatggacgaggggaagcgtgtggccactgataagggccgcattttacctgatgcaatgggccaaagtgaagtcggtttcaccctggaccccaaaatgtcaccgttcttaggaggaatctcagctcctcccctgtccttgagttttccccaactgggttttctcccccaccatcagccccaagcgcctcatggccccgctacctcactgcattcaggtcttcgggtcactgctcagatgtctccactcagagctctccccgcccccttccctggtgttattttcttttattttgtgctacagagggagctaggaattacattattttaagtcatttaaagtcgtccctcccccccggcggtgagctgggcgggaccaggctgtctgtcttgctcagggccagctgcacccagcgcagagccacccaggcacacagtaggcgcccaataaagacctgtccggcatctggatacctcagtctgtacagtgaaggtgagggtggcctgcacgctctcaaaccggaggctgctcgggccgggatgaggagggcacgggctcattcattcaatcagcacttattgagcgccttctgtgtgcctcgcgctaccgggcaccggagacgggcctcggctaacgtgcgggtagagtccaacagacccccggccgctcagcgccgccccgccccgccgccccaggtcctctctctgcccgcacctacctcccgggggcccctcgtccgccgactggcgccgctgcacgcccaacggccgcgcagtctcgaccccacagacgcggcccggagaggccccgctcggcgcggctggtccacgccccgcccacgcccctgcccattggcctccccgagacccgctggcagaactttccatactattggctgcgaaacctgccactcatatgcgactccacctctcctaccggcacaggaaaggggtttcctcccgctgagcggcgggcgcagccaccaagcggccccggcgggaaacccggattggcgaggaacggttccggcagggttgggtttccagagctgtccaggggcgcctggtgctgaatcccgcttggaaagaggcttggaggtggatgggaagggatttccaacggaggcggctcctctctcagcgtcctcgctgctgatccccttaccgacggctgaagaagcagattcatcccttcaacaaatctctgttgataggcaggaggagtaagtccaagagatcgactgtacatcatggtggctacagctcgtaacaatgcattgcatactgcaaaattgctaagaaagtagatgttacatgttcaaaccatgaaaaaataagtataggaggtaacgcgtaagttaaaaaccaaatcttggcagggcgcagtggctcacacttgtaatctcagcactttaagagaccgaggcgggaggatcgcttgagtccaggagttcaaggccagcctgggcagcatagtgagaccccatctctaaaaaaaaaaaaaaggttttttttgagacagagtctcgctcttgtcactcaggctggagtgcaatggcgcgatcttggctcactgcaacttccgactcccgtgttcaagcgattctcctgcctcagcctcccgagtagctgggattataggcgtgtgccactatgccggctaatttttgtgtttttagtagagacggggtttcaccatgttggccaggctggtcttgaactcctgacctcaggtgatcctcttaccttggcctcccaaagtgctgggattacaggcatgagccactgcgcttggcctgatgacttgattctaacaaatagaaaatggcaaatgaatgggatgtcattctgcgattaggctatgagagattgtgacttctgttttgccagcagagcctgtctctcgccttctcagcctacgtgtcttgacaaagcaagctaagatgctggagagatccagagggaaaggaactgagggtgtcctccagccaacagtcagcaaggcaatgagaccctcagcacaagcgtccataaggaaccaaatgctaccaacagccatgaacgtgatcatggaagagggtcctgccccagttgagcctttggatgactgcttcacttcaattgcagcctttgaaacaccctaaaacagggctgcatgtggtagctcatgcctataatcccagcactttggaaggccgaggtaggcaggtcacttaaagtcaggagtttgagactagcctggccaacacggcaaaaccccatctctactaaaaataccaaaattagccaggcatggtggcgggcacctgtagtcccagctactaaggaggctgaggcatcagaatcacttggacccaggaggcagaggtgacagcgagctgaaatcattaccattacactccagcctgggcaacagagtgagaccctgtctcaaaagaaaaaaaaagaagaagaagaagaagaaagaaagaaaaacaaagaccctgaaaacagaagacccatatgaactgcatctgaattcctcacccacagaaactgagataacacatgctgttctagccacttagttttgtgtttgtttgcttgtattttgagacagggtcctgccccatcacccaggctggagtgcagtggtgcaatcacagctcactgcagccatgacctcctgggctcaagcagtcctcccacctcagcctcccgagtagctgggagcatgtgccaccatgcccagctaattttttacctaatgtcacacaggccagtcttgaactcctggattcaggaaaccctcccacctcagcctcccaaagtgctgagattacaggcatgagccacaatgcctgctggcactaagtttgggggaaaatttgtcatatggcagtaggtaactaatacacatacatactagaaaaactataggttgtactaagttctgtgaagaaagaatgagagagacttctgtgcaggaattagccaagtcaaatgtactgagaaggccaggtgtggtggctcacacctataatcccagcactttgggaggctgaggtgggtggatcacttgaggtcaggagttcaagaccagcctggccaacatggtgaaaccctgtctgtaccaaaaatataaaaattagcagggcgtggtggtgggcgcctgtaatcccagctactcgggaggctgaggtaggagaatcgcttgaacctgtgaggtggaggtcgcagtgaaccgagatcatgccactgcactccagcctgggcgacagagcaagactccgtctcaaaaaaaaaaaaaaaaaagaaaaaaaagtactgagaagtggggagagaagagaggatagttgacaaaaagatggagaagggcttgctgcatttgaggagttggaaagccagcctggctgaatgttcgtgagcagtagggagatgggagattagggacagtcccatagaccgtgctatggaacttggattttaccgtaattacagtgtgattcattgaaggattttaagtaggtgaaggttgtcatctaattttaattcttaagattattttgactcgtgtgtaaagaaaggctgaattatagagaagcaagaatggaagcagggagactacttcagagccctctgggcaagagttgggctgggtgccttggcgcacacctgtaatcctagcacattgggaagccattgcaggaagatcgcttgagcccaggagttcgagaccagcctgggcaacatagtgagaccctatctctatttctaagaaaagacttgacggtagtttagctgagggcattgacaggagaaaggacagtgggtgaatttgagaaatattttggagggtgaattgacaggacttagcactggtttgtctgtgtgggttgcaggagaaggaggtgttgggggtgacttctggttttctgctttgagccatccgatggattctggtgctcactaaaataggaaagactggaggaggcacagagattgaaagcgtcaaaagacagagttcagtttcacagaggctataaatgagacatctacaagttcttagcatttaatgccattttctgcctgcgtggcgctgatgtcatcatgtggaacacactgtttctggtagctatttttattattagatgcagagtgatctgactctgtttctgctttccataactcacgacaagaaaaagatggcttgtaacataagcacaccaggtagacgccacaggacgactccttcctaaggggaattcatagcatgcgatatttattcataattgtttggagaatcagcctgctcagggaaagagctacgtaagctttgggctttgattcattcagtacgtgtttttgaaaacctcctgtgcaccagaagccatgtaggagcagatgtcttcagagcgcaacagaaaaaaaatactaataaaatataaaataacataaaagcagcacagtggtgcatacctataatcccagcactttgggaggctgaggtaggaggatctcttgagcccaggagttggagacaagcctgggcaagatgatgagaccctatctctataaaaaaaaaatactgacaaattgactgacttcagtatttcaaaaatcttccatagtaaaaaacaccatgaatgggcttaatagacaagtgacagactgggagaaaaatgttgatactatatgagacagagcccttgatagaaaatagaaaataaacatcttaaaataaaaataggaagggtgatgaatgagcaattcacaggggaaccaatataagaggtgaataaatataagaaaagagtctcaatccatgaagataatcatgaaaatacaaaataaaacaaggggccaggcacggtggctcacacctataatcccagtactttgggaggctgaggcaagaggataacttgagccctggagttcaagaccagcctgagcaacatagtgaaaccctgtctcttcaaaagaaaaaaataaaaaataaaaaataaattaatcacccaggtgtggtgacacatgcctgtcaccccagctactgggaggagggaggattgcttgagcccaggagatcaaggccacagtgagctatgatcatgccactgacctccagcctgggcaacagagcaagtccctgtctcaaaaacccaaaacaaacaaacaacaacatcaaaacaacaacaaaaacggctgggcaaggtggctcacgcctgtaatctcagtgctgtaggaggccaaggcaggcggatcacttgaggtcaggagtttgagaccagcctgaccaacgtggtaaaaccctgtctctactaaaaatacaaaaattagctgtacctgtaataccagctaggtgggagaatcacttgaacccagggggcagaggttgcagtgagctgagattggtccactgcactccagtctggcaacaagagcaaaactccacttcaaaaacaaaaacaaaaaaaacagagaaaaaattgaaaaaatctgaatgtagactgtttattaaataatcatgtcaatattcagtaatgtttaatttcctgaatttaacaattatactgtatttatgtaatagaatgtccttgttcttaggagatacaaaatacatgatgtctggaactttcatttgaattgttcggcaaaaaaataataattattatacatatacacacacataagaagagaaaaaaggaaatttggtaaaatgtgaagaataagtgaatctaggtgaagagcataagaaaattcactgaaagccgggcgcagtggctcacgcctatcatcccagggaggccgaggggggtggatcacctgaggtcaggggttcaagcccagcctgggcaacgtggagaaaccccgtctgtactaaaaatacaaaaattagccaggcgtggtggcatgcacctgtaatcccagctactcaggaggctgaggcaggagaatcactgaacctgggaggcggaggttgtggtgagctgagatcacgccattgtactccagcctgggcaacaagagcaaactccatctccagaaaaaaagaaagaaaagaaggaaggaaggaaggaaattcattgaaatataaacgtggattttttgttttggtttggtttggtttttggtttttgggggctttttttggagacggagtctcactcttattgcccaggctggagtgcagtggtgcagtcttggctcactgcaacctccacttcccaggttcaagtgattctcgtgcctcagtctcccaagtatctgggactacaggtgcctaccaccatgccctgctaattttttgtatttttagtagaaacaggatttctccatattggccaggctggtctcgaactcctgacctcaagtgatccgcccgcctcagcctcccaaagtgctgggatgacaggcatgagccaccgcatccggcctcacatgacatttcattatcacatcttcttaggctcctcctggctgtcacagtttctcagatgttccttgtttctcatgatctggacagttttgaggaggacgggtcagatattttgtggaatatttcttgactggggtttcctgatagttttctcatcgttggactagagctgtgtttctgttgtttgtttttgaggaagactatagaagtgagaggccatccccatcacatcacatcatagcaaagcccatgcagtcaacatgacttaccactgttgacactgactgggtcacctggctgacatagtagttgtcaggtttttctactgtaaagatccttattctttttttgttttcttttttttttttttttttttgagatggagtctccctctgtagcccaggctggagttcaatggcatgatctcagctcactgcaacctccacctccctggttcaagcaattctcctgcctcagtctcccaagtagatgggattataggcgcccgccaccatgcctggctacttttcgtatttttagtagagatggggtttcaccatgttggccaggctggagttttaccgtgtcgcttaggctggtgttgaactcctggtctcaagtgatcgtcctgactcagcctctgaaagtgctgagattacaggcatgagccaccaagcccagccaattattttgtgtgtgtagagacagactcttcccatgttgctcaggctggtcttgaactcctggattcaagcaatccatccgcctcagcctcccaaatagctgggactataggtgcgtatcaccacacctggctaacacttgtttttcaggtccttcaacttgagctatcctggtgtagttgtttgctactatggtttttttgtttgttactatggtttttttgtttgtttgtttgtttgttttttgagatggagtctcactctgtcgcccaggctggagtgcagtggtgggatctcagctcactgcaacctccgcctcccaggttcactccattcccctgcctcagcctctcgagtagctgggactacaggtgcctgccaccacgcccggctaattttttgtattttagtagagatgaggtttcaccgtgttagccaggatggtctcgatctcctgacctcgtgatccgcccacctcggcctcccaaagtgctgggattacaggcgtgagccaccgcgcccggcggctactatggatttagttagtgttctcctgatgtctaatgacattgagctcttttcctcatacttatgggccatttgcctatcctgttttttggaatgtctaagtgttttgcccattaagagaattgggtcatctctcttctcactgatttgtaggagtacttgatatttttataaagtacatattgcaaatgtcttcacccactcaatggctcaatttatccctctattttgatggcatcattattttaatgaagtctaattgttgattaaaaaaaaaaaaacttggccaggtgcagtggctcacacctgtaatcccagcactttgggaggccgaggtgggcggatcacctgaggttgggagttcgagaccagcctgaccaacatggagaaaccccgtctctactaaaaatacaaaattagccgggcgtggtggcaggtgcctgtagtcccagctacttgggaggctgaggcaggagaattgcttgaacccgggaggcagaggttgtggtgagccgagatctcgccactgcattccagcctgggtaacaagagtgaaactctgtctcaaaacaaaaacaaaaacaaaaacaaaaacaaaaaaaaactttatggttagcgctttttgctttctaagaaaattttgcctaccccaaaatagactctatattttcttctgaaacccttgtggctttaccttttgcagattgtatttgtataactctcaaaaacaggcagcacccacccatggtatcaaacgctaggtcagtgtcaccctctggggaggcagtgagtagcgggagtgtggggggactgggaggcagtgagtagcgggaatgtgggggcactgcttaggtttggtttcttggtgtaggtgccaatgatatgggcgtgttcccctcatgaaaattcatcatgatgtttgcttcttttgagacagagtctcgctcttgtcacccaggctggagtgcagtggcatgatctcggctcactgcaacctccgcctcctgggttcaagcaattctcctgcctcagcctcccgagtagctgagattacaggtacccaccaccacgcccggctaattttggtattttttagtagaaatggggtttcgccatgttagccaggctggtctcgaactcctgacctcaggtgatccacctgcctcggcctcccaaactgctgggattataggtgtgagccacagcaccccacccatgatgtttgcttatcattcacactttggtgtaggtatgttacacttgcattaagtctttaaaatgcctgtagtcccagctactcaggaggctgaagtaagaggatcacttgagcccaggagtccaaggctgctgtgagctatgatggcgccactgcactccagcctggggaacctatctcttaaagaaaaaaagaagaaggagaaggagaagaaggagaagcctggcacagtggctcacacctgtaatcccaactttgggaggccaaggcgggagcatcgcttaagatcaagagtttgagaccagcctgggcaacacagcaagaccctatctctagaaaaaaaaagtatccaggcatgatggcacatgcctctagtcctggctactcaggaggctgagggaggattgcttgagcccaggaggtcgaggctgcgatgagctgtgactgcaccactgctctccagcctggaaagaagacacacagaaagagagaccttgtctcaaaaataaataaaaactggctaagcacagtggctcacgcctgtattcccagcactttaggaggccgagacaggtggatcacctgaggccaggagtttgagaccatcctggccaacatggagaaaccccgtctctactataaatacaaaaaaaaaaaaaaatagccagacatggtggtgtgtgactgtagtcccacctactctggaggctgagacatgagaatcacttgaactcaggaggcagaggttgcagtgagccaagatcgtggcactgtgctctagcctgggcgacagagcaagattctgtctcaaaaaaacaaaaattaaaattaaaaaataataaataagtaaataaaaatgtataaaggttgaaaaagcaccattaacgaaagagagggagacagaggaacggggctccccaagtctacctgggcttggcaagaattcgggaccaccgtgagctgatgagaatttctggtttctggtgggcttcgcgggtcctcgcgcgcccacgctgccgggcctcatgtctttgaccctgcatcccacaggtatctcagggccagcctggctccctggtccactgcgtgcatcctcttggctccatcaaagcacgagcacccggtaggacatccctgcttcggaggatgttttctccgtgtcattctgaaaggagacccgattctaagagcaaaactctagcagcagggcggtccctaggctctggcccaggtggctgcagaaggagccacgccttgtcgatcacagccctggcagctgcggacgcacgtgggtgcccgcgggagaggccgtggctgccgcgccccctggcggctccgtgcggaatcgccccggctccccatttccgagaccacatcccggatgcttggactccaatccaatgttaattttttattatttagttatttatttagagacggagtctcactctgtcgcccaggctggagtgcagtggcacaatctcggctcactgcaacctctaactcccgagttcaagcgattctcctgtctcagcctcctgagtagctgggattacaggtgtgcaccaccacacctggctaatttcgtatttttagagatggggtttctccatgttggtgaagctggcctcgaactcctggcctgaggtgatcctcccgcctcggccttccaaagtgctgggatgacaggcgtgagccactgcgcccggcctttttattatttattttattatttttaattttattattttatttgagacagtctcactctgtcgcccaggctggagtgcaatggtgtgatctcggctcactgcaacctccgccttccagttcaagcgattctccttcctcagcctcccgaggaactgtgattacaggcacctgccaccacacccagctaatttttgtatttttagtagagatggggtttcaccatgttgaccaggttcatcttgataccatagtaaagcaggaggaaggaagggaggacccatgtacccctgaatctaaaatttaaaaacaggccggcgcggcagctcacccctgtaatcccagaaatttgggaggccgaggtgggtggatcactagaggtgaggagttcgagaccaacctggccaacgtggcaaaaccccatctctactaaaaatacaaaaaaattagccgggcatggtggtacatgcctgtaatcccagctactgtggaggctgaggcaggagaattgcttgaatccaggaggttgagcctgcagtgagctgagatcgccccactgcactccagcctgggtgacagagcgtgactctgtctcaaaaaataaataaaatttaaaaataataactaaaattagctgggcgtggtgtccatgcttgtagtcccagctacttgaaaggctgaggtgggaggatcgcttgagcccaggaggttgaggctacagtgagctatgctcacggtgctacactccagcctgggcaacagagccagaccctgtctctaaaaagaataatttgacctaagatatttttgcaagatggagaacaggatggggaaggtcactttgttttaggttttcaagttactcagtttggggtgaaatgttttccttcaaagataccgggacattccagagtcagtgacaaattatttttcctaatggcaaaacggtttgggacatggatttgacacatttatctagagagtaccatgtgtctgggcttctcctcctctgtactgtggacatttggggctgaattattctgtggggtggggccatcttgggcactgcagggtgctgagcagcgtctctggcctccacccactcaatgccaggcgcaccccccagttgtgacaaccacagatgtccgcagacatcgccctgtgtcccggggaggacaactgcgcccgttgagaagcaccaattctgcaaaagagaaaaacactatttgtttcctcctcgtggcttcctgggacttaccctggaggggtttgcaacatagtccctgctgggtcaggctttgtaggaactgcaccccaagcgtacagagaagcagagggcagagccttcctaattccacgattacacctggaggttcaacctactcctggagccctgagtcacgacttacatgaaacccaagtttaattaccgcttctttgctctgcgcatctctgacaggaatattcagaactaccctatttcaaacttgtgtgggatcaagcagccattatctatgacacgcttctcatcaagtcgcgcagagaagccactggttctgggatgagatgacagctccccctcgccacccctcctcttctccaccccttggtgattccaaaacaaactttctggaggtctctcaaaggcttgggctgggtttggggtcaactgggaagagactgtgcaggctttcctggtgatggacacgagatgggaggaaatgagccgaggtcgtctacgaagactgaagagcgtgccggctgcggctgggatacacggctcctgcaacagtgtccacaggtgtttccgggagtgggattctccaaacagaggcatcgcgatcacctgggctgcttgtctacagtgcagatccggcccggcgcggtggctcacgcctgtcatcccagcactctgggaggccaaggcgggtggatcacctgaggtcaagagttcaagacccgcctggccaacatggtgaaacccccatctctacccaaaatgcaaaaattagctgggcgtggcggcgggcacctgtaattccagctactggggaggctgaggcaggagaatcacttgaacccaggaggcagaggttgcagtgagtcaagatggcaccactgcactccagcctgggcgacagagtgagactctatctcaaaagaaaaaaaaaaaatgtaggccgggcgcggtggctcacacctgtaatcccagcactttgggaggccgaggcaggtggatcacgaggtcaggagatcgagaccatcctcactaacacggtgaaaccccgtctctactaaaaatacaaaaaattagccgggcttggtggcgggcgcctgtggtcccagctactcgggaggctgaggcaggagaagggcatgaacccaggaggcggagcttgccgtgagcggagatcgcaccactgcactccagcctgggcgacaaagccagactccgtttccaaaaaaaaaaaaaaaaaaaatgtagatacatgtgggtgggccccagttgtgtgttcatcaagctctctgggtgactcttgacacccaccaaactttaagacccagtggtccatctctgtcctgcttcgggcatgagccaccaagcccggccctgacttatttttaatttttcgagacagggtcttgctcttttgcccaggctggagtgcagtgctgtgatcatggctcactacaacctcaaactcccaggctccagtgatcctcctgcctcagcctcctgaggagctgggactacaggtgagcaccaccgtgtctggctaattttttttttggtacagatggaggctcaccatcttattttttgtttttcagacggagtttcgctcttgttgcccaggctggagtacagtggtgcgatcttgtctcactgcatcctccgcctcccaggttcaagcgattctcctgcctcagcctcccgagtagctgaggttacaggcttgcgccaccacgcccagctaatttttgtatttttagtagagacagggtttcaccatgttggccaggctagtcttgaactcctgacctcaggtgatccgtccgccttggcctcccaaagtgctgggattgcaggtgtgagccagggcgcctggcctggagtgtctgatttaggcctggggtgaggcccaagacttggtgtttctactgtgcccccaggccacgctgctgctgctgagctgaggacagtctaaaatgcatccagggttccccttctaccgccccggctctgtggacactggggccagatcattctctggagggggccgtcctgggccctgcagtgtgctaagcagcaaccctggcctccacccccaccattgcaacaaccactcacgtccccagatgctgcccagctaagtgtgccccgggggaagagccacccaggtgagaagctctgcctgagacctgaagcgcccacctgcctcccacagccaggccccttcagcactagacccagcaaccctggggtggctgttctttgaattttgtgactttttggtgtgtcatttttgggagatgacagaggtagtggctgaacctgaaacttcgcccctgcagatctcggttcttcctgctattgcaggggtggagaaggtgggtgcttgagccagggtcctgagccagagtccctgccagggctccgccaggttcagacgctcacgggtggggtgacctcgggcctgatagccaggcctcggtttctctgtctctagcatgagggtgccggtgcccaaccttggcttgtgggaaacaggaattcacagtccacgaaagcttagaggactttcagggagttgttctttcatttttatgtttttgagacgtagtctcgctctgttccccaggctggagggcaatggtgctatctcagctcacagcaacctccgtctcctgggttccagcgattctcctgcctctgcctcctgagtagctgggattacaggcacctgccaccatgcccgccaatctttttttgtatttgtagtagagatggagtttcatcatgttggccaggctggtcttgaactcctgacctcaagtgatccacccgcctcagcctcccaaagtcctgggatgacaggcttgagccaccacacctggccaagggagcagcttctatgttcacaacaaaactctgtgcagcaccctagggttggggctgagatgggcctggaagctttctgggctccttcttgcctgggactccctcactgacccattctctcaactggagccgttgtgaaagggaggtgcctttggttacagaatacagaatttatggagttacagtatgctagaaaagcaacagacaaagccaggtgcggtggctcacgcctgtaatccctgcactttggaaggctgaggcaaatcacctgaggttgggagtttgagaccagcctgaccaacatggagaaacctcgtctctactacaaatacaaaaaattagctgggcgtggtggtgcatgcctgtaatcccagctacttggaaggctgacgcaggagaatcacttgaacccgggaggtggaggttgaggtgagccgagattgcgccattgcactccagcctgggcatctagggtgaaagtctcaaaaaaaaaaaaaaagcaaagcaaagcaacagacaatacgatcactctctgctgaggaccgaggcatctcaccccaccctggggtgaccctctacaccgggatgcagctggggacggaggcggagggaagggagacagcagagggtagaggctgactgtccgaaacctcccatgacccgtgacccgtgacccaagaagtgcggctccggcgtcgcggggattcactcacaagcagcccagctgatccacaaactccgcgtcgggggttttctcgaggtttggggttggagggtatcggtggcgccaaggtcaacacgaagacagacagaggtcacaacgcctatttattccccacacgtcacgccctgcaccccgggtgggcttggcacacacctcaccgccatgagcggctgcagggccgcggcggcccccgttcctactgctacctacgatacacggtactgcgcctacctcacagacggccaggagccagggagccccaggatgctccgactgacaaccctgctgctgggaccacggcgccgtgggctcgtctgccacccccaggcctcaggaacccagacaggctgcctgctgtccggctctccggctgctttcctggtggctgttttagggccaaggtgggtggcacctgaggtgtcccgtggcctccacccagcacaggaggggtaagcttccctggggggccccgggcccatgaaacatccaggacagaaggacagcaggatgggacacagacagaaacggcccagctgccttccctgtgcccggggctaaggcggccgggacagaaggtcatgatgtcgcccctggctctcagtcgcgaggaccagaaaatgagggtgggaggaggggaaacatgtctgtcaacatgcccaactggagaaaagtcacagaaactggtcctatgcacccaggacggctcctgagccgcggaggcgtggggtgaccgcagccgtctcttaggtgtctgccactaaagagttcctcatgcaaacacacatggcccgcggtgcccaggccgcagctggcagtgagctcttccgagcaggcacagggccggggtggccgggaggtcgactcggaaagaggcttctcacagacgggagagttcctgcagacagaccacgggatggggggcgggggctgtaaaaggctttggaagccacacgatccgccacacggctgaacgtgaaacctgccacttctctgagagcggcccgggagcaccccaggattctagaaaacactcaagtgaccgagctttctgggggctggaagggaggtcgctgctggtctgtgctcagcttgctggctctcgtttcaagaagggtctgggggctgtaagggagttacaaaaagggagtggaggagggcagagataaaaggggaaaatccatcttgacatgcaggtccgaggtctctctcttcccctctctcaggcagtccaacaggaggaagtggcagacaaccagaaggcttccttcgggtcggccagggaaggacgcggtcacaccgggagcagctggaaggggacagacatgaaggctgtcagagcgcaggtggggaccaaggctgcaccacacactccaggcagcaggagaggcccagagtggacagccaggggccacagcggctatttcaacgaacgtcagagccacagctgcaccagaagcgttccacacactcggggccacgtgtggctggtggcgcagagaacatcgccatgacctagaagggtctacagtatggtggtactttgtgtatgaggttacggtggtaaaaaatccacctcaactattaaaaaaagaaaaggaaaaataaataaaagcttatttaaaaaaaaaagggaagactggaagaaaaggcggccaaaatattaatgttggtggctctgggtgagaagattaaggttgggctgaatgcacggctcacactttgggaggccgaggcgggaggatcgcttgagcccaggaggttgaggctgcagtgagacgtgactgcaccactgccctccagccggggggacagagcaggacggtctcaaaaaaaaaaaaaaaagattaagattgttcttgctgctttttaacatttttgtattttaaatttgtctacagtaattatggtttaaaaatgaaagagagtgtatatgaggaggggacaacgacaaaatgaagaggccacatgggagcagaatggaaacacctctggggaggcccggagcctcccgcccccagggagccggcgtctgctggagacagacaggactgaactcaggggagcctcccacccctgggaagccggtgtctgctggagacggacaggactgaactcaggggcccctggggaaggaaaccaagccagccacgggcccctggaacccatgggggacactgagtgtatttttaaacaactgtaagtgcaacacctgctcacagtgagaaaaggacaaaaaatccctcacaaaatgcaggcagaacgctcgggcgcagtcaaaggcaggtacccggcttgtcctttccaccactcgatgacctcgcccccacccccgaggtggcagccccgacactgcagaaacaaagagcttctgcaggcggccttaggcaggggggaccccagacaccagcccttccagggagctgtggctctcccctaatctccacccagcgccgatccacagatgggaaaggagtggggagcaggacttggtggccacctggaaaggggcccaatgcccagagatgcccccacctgcctgggcggttcagggtgatcttctgagctggatgcacccaggactcgctgtccagtgtccagacaggctccacagcccccgggcgtcactcctgctggctgccctcactgccaggcactcacgtggtgtcactcctgctggccaccccccagcccccggccccatgcactcacgcagcgtcactcctgctggtcgtcgttgctggcgctgggcgtccgactccggatctggctcctgagctgctctatcaactctgggttctgctgctgcatctgctgggcaaactgctggcccctgcggggaagggcacatggggctcagccagggccaggaggctgcctgctgcctccgtccatccccagctgacccctcgggccctccaccccaaagacaggcctgacccctcgctggaggacgctgggcccttcggagcaggggacgcagcactttcgctctcctccttcccttccgcctgcgagccctgcccgccgcccacgtcctccgtcctcttggaagcagttccactcacgcctggatgaggctggccaggtcgttctgcgaggggctggtgccgggagttcccaaggggttgttgccacccgaaatcatgccggacatgctgcaggagagagcgcgtgactcgcagccgggacagcctgaccgccacccccactgcaggccctcgcagtggcccgggagagaatccctctcagcccttcaccttcccctgcaggagaggattctctctcaccacctggtgggcctccagggcccaaacccaccctgtgactttcacctgctttcccagaacacccctctttctttggcctaaagagcgtagttctcagccagggggtgatcctgcccccagaggacccctgcaatggcagcggacatttgcaacagccatgattgggttacgccaagacaggggcagggggtgctcctggcatggagtggatggaggctagagacagtgctcagcaccctgcagtgcccaggacggccctgctccagaaactggtccagctcaaatggccacggtgctgtggctgggaaaccatgctttaagatttgaccgtgggccagccgcggtggctcacacctgtcatccctgcactttgggaggctgaggcgggtggatcacctgaggtcaggagttcaagaccagcctggccaacatggtgaaaccccatctctactaaaaatgcaaaaatcagccgggcatggtggtggatgcctgtaattccagctacttgggaagacccacttgatcccgggaggcagaggttgcagtgagccaagattctgccactgcactccagcctgggtgacagagcaagattctgtctcaaaaaaaaaaaaaggagaaagaaaaaaagatttcaccatgaaaacaggtgagcagctccccagtgcgcacagcgcttactggggagtgaccctatgagccagcgagtgcactcagaagtttatatccaagagaaacgaaaacaggattcacacagacgattgcacacccgtgctcaagcagcaccgttcacaacagacaaaaggtagaaacagcccaaatgtccatggatagatgtgtggatcagcacagcgtggtccctccacactggaatattactcagccatgaaaaggagcgaggccctgacccaggccccagcacacatgcaccttgaggacgtcacgctcagtgagagacgccagacaccaaagttcacgcagtgtgtgatcccatttctacgaaatgtccaggacaggcccatccacagagacaggaaggggatgcgtggttgtcaggggataggagaggggttggggagtgacagctgagggggaaggggcttctttcggaggtgatgaagatgggttggtgctcaatggtggtgacagttgcatgacagtgtgatggtggtgacagttgcatgacagtgtgatagtggtgacagttgcatgacagtgtgaaagtccttaatgccattaagttgcacactttaaagtggttagttttatgttaagtgaatttacccacaataaaaggaaatttaaccacaacaagacccgaagaaacccggttgtcacttacagctgctgaatctggggattgttcattaggttcgaagcctgaagaacagaacaaatttgtcaggaagacaaagctcccagcgcatcattctctttcatcagacactttccatcttaaccagccttggttctggactccagcacgccaaccaacagtaagagccgggcattcggtctttcatacccttttccctacattttcgcccccccacccacgagctgtgacctccacattgtgacttaaatcctgttttgggttcctgcttcaggagcgatctcgcagcgccacagcgctctctcactggctgctgcggttttgctgtgtggaggcgttttggttctttattttagctgctgtctgctttagcatatttcatttagcatatttggttccagttttgctctatcaataaatagcactgtggctgggcgcggtggttcacgcctggaatcccagcactttaggaggccgaggcaggcagatcgcttgaggtcaggagttcgagaccagcctaaccaacatggtgaaaccccgtctctactaaaaatatgaaattagccaggtgtggtggtgcatgcctgtagtcccagctacttgggaaactgaggcacaagaatcgcctgaacctgggagggggaggttgcagtgagccgagatcacaccgctgcactccagcctgggtgacagagtgagactctgtctcaaaaaagaagtaaaaataaataaataaataaatagcactatactgggcactttctcatgttaactttccacttgggattattcctttggacctgttgaaaggaggtggctcagaggtgtggcaaactctctgtgtaaagggccagtgtgtaaatactctcagccttttcagacacgggtgcctgacgcaactactcagctctgccgccgtatcatgaaagccaccagtgacactaggtgtatgaatgggcatggctgtgtgccaataaaactttattggtcaggtgtagtggctcacacctgtaatcccagcactttggggggccgaggcgggtggatcacaaggtcaggagttcgagaccagcctggcaaacatggtgaaaccccatttctattaaaaaataccaaaattagccaggcatggtggtgggcacctgtaatcccagctactcgggaggctgacgcaggagaatcgcttgaacctgggaggcggaggttgcagtgagctgagatcacaccactgcactccaacctgggcgacagagcgagactccatctcaaaaaaaaaaaaaaaaaaaaaaaccaaaaaaaactttattaacaaaacccagcggcgggccttattctgccaaccccagatgtctgaagggaaaaggcgtctgtgacatggccaagctgagaggccccttgaaagactggggcccagtcaccctccatcccatggtgagggagaacatattcccctggcagcttggccagcggacgagggctacagtaagaggtgtggcctctgctgaatggcacgacccgggcagggctcctggcccagctggctcatttttctgactgacagtgagactgagggcttttctccccgacagccttaggcgagtccctgtaccctgaggctgtgggagcctgaagagtggtcccagggcacacagacctcccaggaaatgaacatgtgtgtgtgggggatggctctccgaggatcccagtcaaggaactccctgccaaaggccgtccctttggaagcatgagtgcccgggcatcgggaggtccacctgcgcccggcgcacccggcgctctgcttcccttgcctgaaccttaggaggcagacgctgctgtgttgtgatcagtgtctctgcactgcgaggaggagcccacgccagggtggggtgggggtgtgacctccctgggctcagccaggagagccagcttttggtgctcactactgatgggtcttgcttgggacatcaacattggggacacttttgattgtcgaagcagagggtgggggtgctcctgacatggggcgggtgaggccaggggtgctgccagcgccctgcggtgcccaggacgaccccacagacaagacccatctggttccagaagccagcagtgccaaggcaaggaagccctggccagtagcggacacagcagatgcgggcctggggggtggcgcagacaccatggacagggaggaggggcgggccgttaccatgctcatgaagccagggttgttcagcaggccggcgatgtcgaagctgcccacgcctcccgtctgaggatgagaacagccctggttagtggggcctggaccagaggccacggtgaataaccccctggaactcagaaacaacggccccccacggggctcagacattctatcaaccctgcggccagagggtgctttgaggcaggcagcacgaagcacatcgcaaccgcccggggacggcacagtctgtcatcccgtgtttattccccgcacagcgcgaccgcccggggacggcacagtctatcatcccgtgtttattccccgcacagcgcgaccgcccggggacggcacagtctatcatcccgtgtttattccccgcacagcgcgaccgcccggggacggcacagtctatcatcccgtgtttattccccgtacagcgcgaccgcccggggacggcacagtctatcatcccgtgttgatttcctgtattctgccgctttgacaccttggggccttgctggcctggcagagccgccccctcctggagtagccaattcccagagaaagcaaatgactcacccagaaacgcacctttgaaatacaaacaaactaacccagaacccacaccctcagcacctcccccatcaccccagggccacagtccacctgccccactcacccccaggccagggaccaggcaaccaggggcagcccccaggcctgggtctaatgaaatggctccaaccagccaacccgaagcctcctcacccggcctcgccacaaaacccacatcgagggtcctttctgtgcccctccctcagcctccgcgggcagccctgcggccggcctcctgcttccaggggtctgggggcatgaaccttctcacgacactcacttccacgcctgtgcatctcaccaccaactgaaacaaaccccggaccctcacgacacccaggttaagcctagagccactggtgcgcccgaggacctgtcccccacccacacagtcagctcggcgttctggagccactcgcccccgctgcactcacggggctgggggcctcccgcagcttcagctccgctatcttgaggttggacttgtatgtctcgttgtcggggtccagctccagagccttcttgtagtaagccacggcctccacgtgcttgttgaggctggagagcgccaggctggaggagagcaccggggatggactgttcccatctgcccagctccaggaggccccgccaaagccctcgtccccggcggtcctggcaacccccaaaccacctcggatggtgccaccccctgcccgctgtcagctcagtggagacaaacctggctttcgaggggcccaggggcaggactgagggagacagacatgagaacacccctgccacacaagaactggagtccccatggggccacacacagggcctcaaagcccagagcgggctgagaggagggagcgggccagctcagggtcacaggaaatgcgtggatgttgtcttggccccgcttcccggcacagggcaccaaggaccctcggaacctctgagcgacagacatgtctcccgtcatccacaagcagcccctgacccccacctgagtgagtcttcactcgtgaggtgactcagggcccctacagagcccaggaggaggcgggtcctggggagactgggcagttgaacagggcccctccccagcctctggggagacccaatcccacaaactctgagcaagggcattcagagaagcaggcgaatgcacgcttatgctgggagggcggcaccggctgcacggggcgcaggctcctgccccggggaccctcctggcctcactctcggacctgtcctgtgtccttcatcataaaccaggtgcttccctgagctctgtgagccgccccagcaaacaatggagcctgagtaggagccatgggaaccccaggtgacagccagtcagggagaagcaaggggcccagggatctccgggtggcacctgatgcggggcgtctgtggggctgagcctgtgacctgtagggactacgttggctccgaacagctagtgtcagagttgaactgaaccggggtgggagaattcgttgtgggtgggaaaaaagccacacaagagaggaagcaggagcaggagaggaggggtcccgagagactggaaaggcgcggccgtggacaggcactcaccccatcctgccgtaggccttgctgtaggccgggtcaatgcagatggcccgctcacagtcctgcaccgcgcctgcgtagttgccgagtttgctgtaggctgcggctctggggaagaaaaggcagggcaggtccctcactggcggctctgagcccagcgggcagcccttgaggggagcctgagagctgcgttcctctccaacttcctggaggaacggcctcagttttccccatctgtaaaatggggctgatggggaaagctgagaggtgtggccactgagatgctcttagacaaatgtgggctcaaagcaccagcagccactcaggactgcgactctgaattttatttgcaaaaaatgttccgatccatggctgtacaagagcaatgagggtagggaacttatacccaagtttcattcacaaattatttacatatcagtaaaaaaagaactcagaccaatgtcaaagctcaaagctcttggcttacagcgtctgaatcgtcttcaccattttcgtgtttagtgtttctctttacaattttttcaaagtacagagaagagtgagtggagactaaactaccccatgacaggcggccaggaaccctgcactgcctctgcaactgtcctgtaagcctgaagcagatccaagaccacacattcaaaaaacacaaccctccacatactggattattttcttggcttgacatccacgtggaatgccatgatacctgattttctatgtatgtatttatgtatttattatttttgaaacagggttttgctctgctgcccaggctggagtgcagtgacacgatctcagctcactgcaacctctgcctcccgggttcaagtgattttcctgcctcagcctcccaggtagctgggactacaggcacccaccaccacatccagctaatttttgtggtttttttcggggtttttttgagacagagtctccctgtcacccaagatggagggcagtggcgcaatcttggctcactgcaacctctgcctcccaggttcaaaccatcctcatacctcagcctcttgagtaactggtggtgcccaccactacacccggctaattttgtatttttagtaaagacggggtttcaccatgttagccaggctggtcttgaactctcaacctcaagtgatcccccccgcctcagcctcccaaagtgctggaattacagacgtgagccaccgcgcctggcccccagactaatttttacattttctgtagagacgggggtcttgatatgttgcccaggctagtcccgaactcctagcctcaagtgatctttcccccatggcctcccagagtgctgggcgtgctacctgattttaaatcagcatcgactctccccgaccccgttgctggtcacctgatgctcgctcctggtctgagaccaccggtgaatggatccctcatctacagcgcagaggcctctcccatctcaggtccctgctaagcatcccggaggacgcccccgcacccggccgcccctgccctgggcaggccctgagctggtacctgttgcagaaatagacggcgttggctgggttgagctcgatggcttttccgtagaaatgcacggcagcttcaaagttttccactttcatctgctcgtttcctacagggagagaggaaaacaccggcccggtgtccacacagaccggagggggtgtcagggagagaggaaaacaccggcctggtgtccacacagacccgagggggcgtcacacttggctcttctgggcagccaggactcaacacagatgccggctcaggaggcatctgcatctatagggggttcgctagtcgcaaacaatcatatctacatccactaagggggatggaggtgggggcggcagggcctggcctggcctgtgcctggcgacggtggctgtcactgcctggatggcgaccccgggagcagaacagttaatacagctcaccggcccggggacggaaactgtccctttcgctattgcttttggaaagagcccaagtggaggcctgtattttggaatactcatgtgataccttctcatttcataggcaatggggcttctatctgaggcatgggtcccagctggtaggacggtaaaaaccccagctgctatcctagaactgagagccctgaagacagaaacccactcccgcccccgagatcccaattcaggagggcgtggggggaagatgggtatcagcgtgtgtttccctaaacagttttattgagatataatttacatgccacaaagcttacgctttaaaaatataagcccgggcgcggtggctcatgcttataatcccagcactttgggaggccgacgcaggcggatcgcaagatcaggagaccaagaccatcctggccaacacagtgaaacctgtctctactagaaatacaaaaattagccgggcgtggtggtaggcttctgtagtcccagctactcagaaggctgaggcaggagaattgcttgaaccagggagtcagaggttgcagtgagccgagatcacgccactgcactccagcctgggcgacagagcgagactccatctcaaaaaagaaaaaaaagaaatgggatcacatgctgtgcgtccttttgtgtctggcctctctccctgagtgtgatgtcttcacggtgcatctgcgctggggcctgggtcagagcctcacccatccacattccaccgtgtagatgggccatgctgtgctgaccatttagcgtggacaggcatttaagctgtttttgcttctttttattgttttattttttattttttatttttttttgagacggagtttcactcttatcgcccaggctggagtgcagtggcgcgatctggactcactgcaacctccgcctcccaggttcaagcaactctcctgcctcagcctcctgagtagttgggattacaggtgcccaccactgcacctggctaatttttttgcatttttagtagagacggggtttcaccatgttggcccaggctaggcttgaactcctgacctcaggcaatctgcccgcctcggcctcccaaagagctgggactgcaggtgtgagccaccgcgcccggcctcttcttgctttttgactcttgtgaatacagctgctgtgaacatgtgtctgggttttggtggacatgtgtctctcttgggcacatatctagtatcagggtggaaccggcgggtctcatggaagctgtgcaacttttgggggccaccagccagtcttccacaggggccgctcccgacaaccccaccagccgtgctgtgcctgaaggtcaagtttctctgcacctcgccagtcccctcgccagtcccccttccgtccccgtccccacaagccagcgtgctggtcatcagggcaattccctcagctccctgggccccagggaccagctggcctctgcgagggtcccacagccccggagtccaggtagggcgaggtgtctgtggggatggaggtcctcccttaccttcggttttgaggcgctctgcctctgctgagtcctcctcggaaggcggggttcgcgcggggctcctcaggtcctgcggcatctcctggacccggaggcaaaggcggcccgctgtcctctcctcccaacctggcaccctccggccttagcttccctcgggacgccagagagggccaccaagttccgaaggacccgggggctctgcaggggactcctggccccccatcatgtggccctgggcgagtgaccacagcgctatgtgtctcaggacccgccgatagggggaggagggccaagtgctcctgcagccacgtccccagcccaggagaggatgcaggcagagtgctgggggacgatgagagcggggctcctggggtccccagggctgcctgctgttgctgttcttattttgggggcagtggctggggaagcatcgaggctcaccttgcccgtggcagccgcttcaaatatctccggcagagtctgagggagcgcaaggtcactgtcttctaccgtcaccccaaacgcagtctccaggcactggatggcgactgaagcggggacagaggcggtcccattcattgcacgcagccccgaggttacgtttttgggtctagagggcggggttggtgctcatgcttccccaggtgtgttcattcccaaggaccccagaacgcaggggccgccgcctgtgctctgggctgggacagtggaccctcttccttcccgaaaagaaaagccagacagagacgccccgtgcccctgagagcagcagaggccgtgggcagagtggagcccaggtggtgacctcaggcctctgtggggtcccaatgctggggctgcccggctgcggcgtggtgggggcttggccccacctggagggccacgtcaggggtgaggtgccccggatgctgttgcacctccaagggcgcctggcctgagtaaggagcttgaagccagcccccagtagaaggcctgtatgactgggtctgtaccagggcaggaccattgagagcaggacaagaaacagccacagggcccctctctctgctggcccacctgacagactcagcacccagggggccctcccaccgagccagacaacactagccctggccgcctcctcgtgtggacccagggtcctaacccaggtcagaagtgggggtcagccacttcctgcccagcactgtgtcaaggaccccgggcacatccctacagctgtcactgggtgtccatgctacagaggcctggcaggcccaggacacaggtgagcgaggcataggtggggaaggaggacctagagcagaacctgcagccacacgagggtgcctccccgagccctcctttccctccgagccccggatccaggtgtcgcagaagcgcaagcaagaccagccaggagaccaaggcacctggggagcggacaggccatgcaggatgccaacgagtctgggactctggggcggggccagcactaggagagctttttccccgtgaccgatggtgacacacacacactgggtggtgagaacattccagaacacaccttggtggaagatggggagatggaaaaaagccactggaaggcagctcagcctgaaggcatcaagcagtggtggcgccacgcagtggcaggcgggagggctcagctcggccctggctcccacggccgggggctgtgtggccctgggcagacccctgccctctctgggcttagcttccacccccaaaaagccaggcgggggaccaggcatctacacaccaggtgtctacacgaggcgactgtgctggccgctgcccggggagagggggaagtggcaggcacccacctaccttccaagctctcctgagcatcggacgagaggcccccgtgccggagctggtcatgcaggaactggatgatggcgtaggccaggcgcttcttgttgtccatcttgagcccagaagaggtgatacctgggggtgcaggaaaaacccccatcaggccccctcacactccccactccaggcaccccaggcctgcccctaactagctgggcctcactttaagggtgctggctgatctcagctccaggacagcccaggtagaaaggccttaatacgcccatttcacagatgatgacctgaggcccagagctcaccaatccggctatgcacacagccagaaagtgtgaggccagcaggcaagcagggcctgccctagagaacccgcgtgctcccagggcctcctgagcactcccagggtggtactgaggcgccacggaggtcccctccgcccctgcttctggcatgaggtgggtgggggccagggatgctgcccagcaccctgcagtgcccaggacagctccactccagagaacgatccagccccaatgtccacagtgctgagagggagagaccttgtcctcagccagagccactgcccctttcctcaatttacctcttttgtggcatgtcagcaagcatttcttaggtacccaacggggccaggtgtgcctgccctggtatcactgtttcacaggacttgcagaggactccccccagggacttcttggggacccgtcttgttccccctgggaggcctacctacctcattccacctcagacccccctctagttccccctcggacaccctcctgtgcccccctcggacacccgcctggttcccccacctgacaccctcctggttcccccagcggacaccctcctggttcccccagcggacaccagcctggttcccccaccggacaccctcctggttcccccagcggacaccagcctggttcccccaccggacacccgcctggttcccccctcggacacccgcctagttcccccctcggacacccgcctggttcccccctcggacacccgcctgtgcccccctcggacacccgcctgtgcccccctcggacacccgcctggttcccccccggataccctcctggatgccccctcggacaccctcctggttccctctcagaaaccctcctggttccccctcggacatccgcctggtcccccctcggataccctgtcttgttcctcattcccaggacttgacagctgcttctgctcatgtctgtggtccctgcagtttcctgccaaagctctaaagggtgccagatggtgacatcaggagaggctgttctggaatctggagctgtagtctatggacaggtctttttttagtacaagacctttcacacaggtttcctgggtgcctgggccaacttggaggggcctcggccacagtgaccttcacggctctgagcaggaagccccgacgtgagcttcccccggggcaggctggccggctgccttgaggcgccagctcaggaaggcttggcctcactgtgcctccatttcccccgaaggctggcgatggtgactctaaacattcagatgtaacaagctgcgtggagaagcagccgcccccgcccccgccgctggagcagccaagttctgggctagtcacgtccacctgggacctgagcacgggaccttgtctgtgtctttgcagatggaaacaagtggagatgaggtcgctgtggtggccctaatgcagggattgaacatggccgcacggagacggccgcgtgaagacggaggcagaggctgaggccatgtggccacacgaagagaggtgaggctcgctggcccccagcagctggaagaggcaggacggagcctcccttggggccttcagagggaacgtggcccagcctgcaccttcatctcagacttctggcctccagaactgcgagggaaatcaatcttggttgttttaagccagccgggttgtgagggagaggccaggcggttcccggatcgtggcctgcaaagcctgtgagctcggacgggttgttcggcctgagcctccgcctccatgtctgtaaaatggggagctccattgtggctgctgtcaggggtcggggaaaaaataacccggaagctgtcagcccagcgcttggcgccctgcgatatctgttgttaatatcacgattctgccaggcgtggtggctcacgcctgtaatcccagcactttgggaggccgaggcaggcagatcacgaggtcaggagacagagaccatcctggccaaacacggtgaaaccccatctctactaaaaatacaaaaattagctggcatggtggcacgtgcctgtaatcccagctactcgggaggctgaggcaggagaatcacttgaaccagggagttggaggttgcagtgagctgagatcacaccactgcactccagcctggcaacagagtgagactccatgtcaaaaaaaaaaaatcatgattcctcgtggtgagtctcgtggcatagacctcggttggctgtttttggcagtgtgacctaggggaagcgacttaactctgctgagcctcagtttcctcttctgtcccccatggatggcgacagcacctccccatcggggggggggggaggggtacgagaccaggcgtgcacaacgctgagtgaacacccccacacaggcaggtacgtggacgggtgctggtgcaccctccgtgtccagatcaacacatgctgaggctattccagaaacgctgcccggctgtgcagtttcactgggagcatttggagaacctgctctgaggccagaagcaggcatggagaggggttgctgtggtgctggcgcatggaggggcagcccttggggaggccctggccgtgggatgggacccccatcctctgttcttgcgatgaggttcccttggctgggcctcccttctccacctgctccttccgggctgggctgggcagccgccttccctggaatccactccctgtccagggcctctggtgtctctgagcagctgggtcttccccatctctgtccctcactggctgacatacagggtggcggggctgtgtgtcaccggccttcctccggggccgggcccagcccgtgcatagtggaccttattcttagttgcactctgtgtgccaagacgcatgaggcaaggggcaggcctgaggcctcaggagctggggaaccaccgtgaggagaagcacaggtttgagatcagacgctcggattcaggctgggtcagacagggcctggccaagaggccgccagcctcgggatggacgaggaagggcgaggcctgaaggaatcttctacagtgacagctgcctctggataatttcttattcttctctgctctgtgcccagatctgctctccaagaagtgactaaagccacaaacacctacaaggaaactctgacccagcacccaggaggccacggctcctccttctgagccagcacagtgcaaggggtctctgccgccaggtcccactccccagctgggccccagggaccctctgcgcgcagccacgctgacaggcggctccaggggctgaatactgtcgtgtgctgaactgtgtcccccaaatccatacactgaagtcctaactgccaggaccttggaatgcgacctcacctggaaataagatcttggcggacagaatttggtaagatgacatcataccagtgtacggcgggtccctagagcaataaccaatgtccttataaaaaggggacatttggatgcagacgcatgcacagggagaacactgtgtggatgtgaaggcagaaatgggtgacgcggccacacggcagggacaccgagggcagagatgggtgacgcggccacagggcagggacaccgagggcagaggtgggtgacgcggccacagggcagggacaccgagggcagaaatgggtgacgcggccacagggcagggacaccgagggcagaggtgggtgacgcggccacacggcagggacaccgagggcagaggtgggtgacgcagccacacggcagggactccgagggcagaggtgggtgacgcggccacacggcagggacaccgagggcagagatgggtgacgcggccacacggcagggacaccgagggcagaggtgggtgacgcggccacacggcagggacaccgagggcagaggtgggtgacgcggccacacggcagggactccgagggcagaggtgggtgacgcggccacacggcagggacaccgagggcagagatgggtgacgcggccacacggcagggacaccgagggcagagatgggtgacgcggccacagggcagggacaccgagggcagagatgggtgacgcggccacacggcggggacaccgagggcagaggtgggtgacgcggccacacggcagggacaccgagggcagaggtgggtgacgcggccacacggcagggactccgagggcagaggtgggtgacgcggccacacggcagggacaccgagggcagagatgggtgacgcggccacacggcagggacaccgagggcagaggtgggtgacgcggccacagggcagggacaccgagggcagaggtgggtgacgcggccacacggcagggacaccgagggcagaggtgggtgacacggccacacggcagggactccgagggcagagatgggtgacgcggccacagggcagggacaccgagggcagagatgggtgacgcggccacacggcagggacaccgagggcagagatgggtgacgcggccacacggcggggacaccgagggcagaggtgggtgacgcggccacacggcggggacaccgagggcagaggtgggtgacgcggccacacggcagggacaccgagggcagaggtgggtgacgcggccacacggcagggacaccgagggcagaggtgggtgacacggccacacggcagggactccgagggcagagatgggtgacgcggccacacggcagggactccgagggcagagatgggtgacgcggccacagggcagggacaccgagggcagagatgggtgacgcggccacacggcagggacaccagattgccctcacgtcctcacaaggaacgagccccgacagaaccttgatcatggacttccggcctccaggactgagagacgatgaactctgtttcagctgcctggtctatggcactctgtcaccgcggccccagcaaaccgacactaacacctggcaagcaggcatctcaggacgcacctcagtcctcgtgacgactccaacaagcgggtcggccctgtctccagctgaactgagccaggttgggcagggacgcgtggtcgcatgcccaggatcacatagacaggagaacaaacgggctgtcatcacacggaagggagcagtgaagggcggtggccgagggacacggagggagggagcagctgcgcgttgctcactgtgctgcggtcccaggagccagctgcccgaggggcagcttcttttataagaaaacgacacttcctatcacgtctatgcaaatgtccattttaactttaagtgcacagatgtctaatggcccgagacacgtaggttaacacccgtgcacgcgtacacagaggccttcacctacaaccatccccgtgtagacagcatcagaggcagggcaccaaaagcattaaaaccatgcagatgacctacctgagcacttcgcagacctagaacgtcaactatgtaaaatacctgcccatgaacattggcaaactcctggcctcaagcaatcctcccaccctggcctcccaaagcgctgggatcacaggtgtgagccaccatacccggcctcctccaggaggcaaatgctgaggaaagccgtggattctactgacccactggattttgctgaagctgtgtgcgcgcgcatgtgtgtgtgtgcgtgcatgtctctccagattctgtctctctcccagaccagcggttctcgatggatgtgctgagacacttggtgttgtctcacatggagtggggggaggccagggacgctgctcagtgccctggagtgcccaggacggctccatcccagaggatgatccggcctcaacatccacagctcccactgggagaaagctggactagaagaggaggacctgaagagcctgtgggtgcaccaggcccttgacacaacaccgtctcatgacctcggcgcagtgacctatgcggcaggactggggatggaggtgttcactcaaggccactggagccacaggcacggcaggatccgcgcccggcaggcgcctgacctgcccccacactcaagatcagaggcgttcagtgtcttggttcccctaaaatgcctctacatgaggtgaacagccaccaccccctagaaaatgaggcgtgggctgcctgaccgcataacccaccccgcgccagagacaagcaaggcattggcccgccacgctttaaacagtggctgacgtcagactcagatgacaccggcgacgtggacctccacgccactaaacaagcatagtcccagacacactgggtgtgcccacagctttgtttccctttcagggaaagcaacatccatcagcaatcattaaaaaacaaaacaaaacagagagcaaaagagccagacccaaagcacacacagggtgtgacaccgactccatttctatgaaatgtccaggacaggcccatccagagacaggaaggagacgcgtgggtgccggggcttggggaggggaaggggagtgacagctggtggggaccagcttccttgctcccttttggggcgatgagacagctctggaaccagagagtggtgatggttgcacaaccctgtgaaggcaccaaatgccactgaatttcacggtgtggggatcacagcggtgtgggaatcacagctcaatgttttaaagggggagaaatctacaagagctgtgttttgtgtcgctggacagggagttacggtcttcctgaaagctcctgcgggatggtaatgagttttccgcccccatctcaggacacaatggacagcccagaactttgaggtctgggatcaggactgcctagagccggcgggcagccagtcccagaatccaaagatctcatgtacgacacatcagggcccacggcagtcaaccaccaccagaaagtgaaaccacaaaagctgacgtcatccgccccggccaacagggttcagagagcaaaccagtcaggtctcctgacccccaagcccaaggaaaacagacacatgccacccgaaaggtgaagatttttggtttacggagtttcttttgttttatttttaagcacgttttgacaacagcattacaatagccaaaagcaaacagcccaagtgtccacggacaggtgagtggatcaacacaatgtggcctagccacacgacggaacgctacgcagccatgaaaaggaaatcctgaccaggctacaacatgggcggaccttgaggacgtcgcactcagtgaaataagccagaaacaaaggtacaaaacctgtgtgactcccctcctaggcggtccctagagtcgttggattcacagagaccaaaagtggaattgggggtgccaggggctggggagtgaatgtttcatggggacagaatttcagcctggggagatgagaaacttctggagatgatggtggcgatggctacatagctgtgtgaatgtgcttaaagccactgaactgtgcatttataactgattaagatggtaatttttggcctggcatggtggctcacgcctgtaatcccagaacttttggaggcagaggcaggtggatcacctgaggtcaggagtttgagaccaacatggtgaaaccccatctctactaaaaatgcaaacaaaattagccaatcatggtggcgcacacctgtagtcccagctactcaggaggctgaggcgggagaatcgcttgaacccgggaggtggaggctgcagtgagctgcgatagagccactgcactccagcctgggtggcagagcaaaactccgtctcaaaaaaaaaagaaagactggtcgggcacagtggctcatgcctgtaatcccaacactttgggaagccgaggcaggcggatcacctgacatcaggagttcgagaccagcctgaccaacaggtgaaacccagtgtacaaaaaatagccggtcgtagtggtgcgcgcctgtaatcccagctacttgggaggctgaggcaggagaatcacttgaactcgggaggtggaggttgccgtgagccaagatcgcactactgtactccagcctgggcaataagagcaaaactccatctcagaaaaaaaaaaaaagaccaggcgcagtggctcacacctgtgatcccagcagcacttcgggaggccaaagcggggggatcacttgagcataggaattcaagagcagcctgggcaacatagggagaccccatctctgcaaaacattaaaaaattagctgggtgtggtggcacacatctatagccctagctgcttgaggggctgaggcaggaggatcgcttgagcccaggaggtccgtgctgcagtgagctgtgatcacaccaatgcactccagcctgggaaagagagtgagaccctgcctcaagaaaagagtttctcttcaaagtctggggtctttgagatgagggtcacacccaaccaggtgtctttagctgagaatggtgccgacatctcttcagaggtttcattggaaatgattctgtaacaggcggcatcaggtcaggatccccaggcagacacacctcacttggtgacctcagatttggaagaggcaacagcaagcagcagaaacaagacctgggccaggagcggtggctcaggcctataatcccagcactttgggaggctgaagtggtctggagttcctgaccagcctggcttctactaaaaatacaaaaattagccgggtgtggtggcgggtgcctgtaatcccagctactcgggaggctgaggcaggagagttgcttgaacctgggaggtggagactgcactgagctgagatcgcaccactgcacgccagtctgggtgacaaagcaagacgtcatctcaaaaaaaaaaaaaaaaaaagaaatcagacctggctgagtccccgcataaacctagaaggcgggggtcacagccccctcttacagagggagtgacaggcccagacaggtggcacacgcaagatcctaccagtgacagctggaactcggcttagcattccaggcacacagggcctagcacgatccacgctgaggggtgtggggggcaggggtgtgtgtgtggagggggatgtgcgttccttcgcagggaactaacacagaataaaccaagaaatctcatctttggttctttggtgtacctgtttccttctctcttaaactgaggtgtgagaactggacagggtggcaggtggctagggacccaatgagggttcagaaagtggaaagagttgcattcactgagtcacactcctctcttccagtgccgccggtgcctctgtaccccagggcttttgcacgtgctgctttccctcctggaacaccgccccccccggcccccgccgccacatcccagagaacctcttagcctcagggtctccaccctaccccatccctgttaccctgggacagagctgagcagaagtgccccagcttagacaccctgggctaggggatgccacggatccccaagagactctgtgtcccatgatcatttgctctactaaggtcccaggaggctgcacacattgaaattcacaaactatggaggattgcttgagcccaggagtttgaggccaacttgggcaacaaagtgaggccctgtctctaacaaaacaaaacaaaacaaaagataaaataaatccacacactaaggggagagggagcaaggaggtgaatcctaggagctggggaccccctgatttccaccctctgcccaatcagaagtttattctgctgtccagtgtgagcaggagcaagctcaatttttttcccaaataattaatgcaggtctgtcgcctgtggcactgtgggcatcttgggtggatgattctgtcctgcgcacggcagggggctgagcagcacccctggctccccccactgcacaccagaaacactctccagttgagacaaccacacatgtccccagacactgccaaaccgcccccagctgtaaatcactgatggccactaagtgggaagaaaggctggaagtcagtacaggtcagctttttctgtccaaaatgactttgctgtgagctttctgaaaaccttctgcttgtaggctattctgggtttcagaactgcgggtccacggtggaggactgctcaactaagggaagcacaggccctgcccagcatgtgacacaggccagtggtgccaggacctgtggcttctctgctgtccccaaggtgggggacatcatcaaacggttctcaaatctgcttcaacagccaggctttcccgtaagaaagttttctgctcttcagaggggggtccagcaagcatgaggacggcattttcctcaactgccgtttggcactcggtgtctttggaacaatcacaacttgtagggtttggctgtgggacagcatctcaaagaaggcctgctgtgtctcccaacagcgagggctttatggatgctcaggagccatggccgaggcctggtttcaaggcagaggccgcagaagtgagggtgggagggtgctggcccatgggggtggcgccagctccaatgttgggggcttcagcgtccctttcggctctgagccgatgactccacatcccaccttttcattttatcattaaaataaaaacaaaatcaaaacacagccacctcggtcggggcggtggctcacacctgtaatcccagcactttgggaggccgaggtgggagaatcgcttgagtccaggtgtttaagaccagcttgggcaatacagtgtatagtgagaccctacaaaagagactctaaaaaaaaaaaatagaattagcctgatgtggcggcacacactagtagtcccagctacttgggaggctgaggcgagaggattgtttaagcccaggagttggaggctgcagtgagctgtgattgggccctgcactccagcctgggtgacaaagtgagaccctgtctctaaaaacaaacaaaaaactcacaaccacctctcttccttatttccctgcccagaagggatcattcaatggaaaaaaatagaacatcctcgtaaactgaggtcgtcttacctcctcacaccccagtaggaagggcccgctcttacccactaccttctgtgaacactctgcccaactccatcccaaatccacggtgcttctcaccaacagcagggcaggagagccgggtgccctgctcctcactccctcttaggatacccgagttctagctcagtctcctgcccactccccacatcgaagcctacttccttctaaaatgccaccaggagatcgctgcacacataaaagctctcaactgctccttgcaaccccaggagtgtgcataggaggcctctcaccagctgggggtcatctgtggggcctacaccaaaccctgtacatgccactcaaactcaagtgctcacctcccctgcccaactccgccaggagagaatctagtattcctgcaaactcctatctctggcccagcatctcttacaaggctttctatctcttgacagacccatcttccctttgaacgccagcatctggcagcgtctaaaccctatggactcaggaaagcctgcgattgttgaaaaattcacagccacatggtcacgttccttggggaggccatttctctctgggtctctgtttccacctcagtaaaagagaaaacgggccaggtgcagtggggcacgcctgtaatcacagaactctggaggccaaggtggaggatcacttgaacccaggagtttgagaccagcctgggcaacacagtgaaaccccatctctaaaacaaaatacaaaaattagctgggtgtagtagtgcatacctgtagtcccagctactcaggaggctgaggtgggagggcctgagcctgggaggtcgaggctgcagtgagcagagattgtgccactgcactccagcctgggcgacagagcaagaccctatctcaaaccacccctttgttccttcagcctgtactgagcacttcctaccagagccactgttgggtcttggcataaaaaagaaaaaatgtagaattgagtaagacgacagctctcaaggatcctccaatctggggcagagctcacccgcatttggaatcattcacccttctaggaagatttaattataaacctcagctcaaatccttggcgtgcttacagctttccaggcacccagttaagtgctgtacatgcgatagcttattttaggggtcagcaaaggtttttctgaaaagggccagattgtcttcagctctgcaggcgttaagttccctatggcaactgttcaactgtgccttcttagctcgaaatcaactacaggtaacgcataaaccaaggagtgtggctgtgttcctacaaaccttcattcacaaaaacaggccagaggtggatttggccttctggtcagtttgctgataccttgcctggtttaatcctcacacacctgaggtggttactattataatccccattccacagaagaaaaactgaggcttggaaagatggggaccacccgagaccacccagctccgaggatgaaaatgaggagttctgaacccaggcagtctgacttgagaagctaaactccaaagtacccatttctctctgcacgaaattgggtgcacacacaaaactttgtacacgatttcccgggcccacacagtcccagctgcccatgctggtgaagaatcactgatctagggtagattttttttttttatttttgacagggtctcgctctgtcgcccaggctggagtgcagtggcatgatgttgggtcactgcaacctctgcctcctgggttcaagggattctcctgcctcagcctcctgagtagctgggattacaggtgcacaccaccatgcccagctaattttcatattttcagtagagacggggtttcaccacgttggctaggctggtcttgaactcctgacctcaggtcatcagcccgtatggtagggtttttaaagcattattgacatttaaagctggatcattttctggggtgaggccgtcctgggtactgcagggtgccgagcagcaaccctggcctccaccaactccaaaccagggggtcccccaaatcatgacaagcacaaatgtcaccaagaatccctggggcacagaattgttcctggttgagaaccactggtcaagggagggaaaaggcagacaaaaggaataatcagagacagaaacaaaagaaaatgggacaatcattcaacctctgaagggcacactacactgcaattttctggcacctaataacaaaaacagctattctcaagccagctctctcttatcaagttccaggcacctgatcaaataattgaatgtgggtttatcctcataatgaccctccgaggcatctgcttttacaactcgtttgcgaaagaaggaacagtttgctcagagagggaaggcgactcacccaggtttacacagcgggtgggaggtggtggtggacggtcctgaatcccagatttcccccacctctagcacgatatgcagaagaagactctaaacatgatataagacgaacgcctgctaattctttggagttctcagattccgctggaccctgcggctctccttctcctaggcagggacttttgaacaacgcccgttttacagaggggaaaactgaggctccgagaagccaagaggctgggcaaggtcacccaggtagggactggcggcgctggaaccagagttccgacttcagtccccacaaacgggggtccctgagtcacagggacgacgtttccaggcggttaataagagcggaacggcagcgaacacccagcgagcgctcactacatgcggggcgccttcccctcccgccgtcctcgccaccaggccgcggaccagcatttccaggacctggggcctggggaagggagatcagggctcgaagggcctgcccgatggcgcccggcctcagtttcccctccgcaccgcctactcacaggaccccgcgggtcgcggtgaccctggcctcacgatccccaaactcttacgagctttggggccccgtgggccccgagccgcagaccccagacccaccaggctcagcgcagtgcccctcactcacctctcaggcgaccgatccccgacccaccgacggttgcgcttgcgcaccgcggtgccgcccggccccggccccagggcgcgacgcctgcgcaaaagaaaggcgcccggagttgcttcccttctgcacaggcgcgttaatgatggaggcgggcgtggaaggaagtgacgcaacgtagaggcgggaaccagctggttgttagggcaactgacctctgcgacctaatggaggccggaaatcgggtctggtttgccctctagagcgggaatgaagcggtgcacggtggaacagtggctgactccagccggtcgccgagctgaccacgtggtgctgggccggccacgtggtgcagccgcgtttggacacctggactccagagcgtcacagctgcgcaatgaatgggagtcagtgttacccgcttactatctttgttcatttattcacccacccatctactcacccacaaatgcattctttcatgcagtgtgagacgtttgtgagtatagagccatttgtagacagcaggtgcctaatattcattcaatatttattgcaaagcagccataaaaaccagcaaagtgtctactctcattattttgcattggggtagacggactataaactaataaactagtacataaatagagaaacaaatttcacagcaaacactaagaaaaaaaaaatgaaggtagtgtgattgtcactgggagctaagtcgcatgggatgggtaggaaagatcatcctttacatttggatttcaaggataggaaagtccaaacggaccccaggcacagggaacagcgaaaatgaacgccgatgtaaaattaatcttggtgttgctcaagacatgtgatgagacatttccaaggacgacagaaaactgatcaccatctaagttacagttgccagaaatgttctcccaattcattttcgtcctactcaaaatacatgcacgattaatggcgtggattattttaatttcttttgcagaaataaaggaggtgaggccggccgtggtggctcacgcctgtaatcccagcactttgggaggccagggggcagatcacttgatgtcaggagttcgagaccagcctggccaacacggtgaaaccctgtatctactaaaaatgcaaaaattagccgggcgtggtgcgggcatttgtagtcccagctactcgggacgctgagacaggagaatcgcttgaacccgagaggcagaggttgcagcgagccgagatcgcgccattgcactccagcctgggcgactgagcgagactccctccagcccctccaaagcaaaagaaaacaaaacaaaaacaaaaaaagggaagaaaggaggtcggttgttttggtttttgccagtttaattgtagtacattgttttttctgggtgccctaacagttcaagacagatggttcaagatgttttttgttttaacccacaacactgcatgtaggtcaggctactgcactgttccacaacacctgttatttgacatgaatccgtttacttgcttttgtttctgacaaaaaaaaaaaaaaaaaaaaaaacttggcccggcgcggtggctcacacctgtaatcccagcactttgggaggccgaggcgggcggatcacgaggtcaagagatcaagaccatcctggccaacatggtgaaaccccctctttactaaaaatacaaaaattagccggggtgggggctggcgcctgtagtcccagctcctggaaaggctgaggcaggaaaattacttgaaccagggaggcggaggttgcagtgagccgagattgctgctactgcactccagcctgggcgacagagcgagactccgtctcaaaaacaaccaaagcaccaaaacttctggttaatttaattgattcgtcggattcagatgctggaaagtgggcctgggatatacagtaagcgatcaataataacactggcccaacacacagctataagaagcgaggcaagtacacattaacgcggtagcctgaagcccaagcgaagtctcagcgcaatgagccgcgcagaggctcagaggcgtcagcggcgtgcgcggtttccaaggaaaccgtccgtcctagccaccccagcggctctggaatggtagagcaagaggctccgcccacgcaccgccgagaccaataacggaccgggagggttacggcgagtgcgcagagggctccagcgcactcccggccctcctcctttagctgtgggcggggctcaggggcgcgtgcgtcctgccctccctgtgcgcgcgccgccccagcatgccccgggagcgcgggcggcgggccccttggtcctcaggcggccgtggcggcggtggcggcggttgggccgaggcaggcggcctcagtggccgaggtggctggacgcgtagcaggtggaaggagggagggagccgcaggcgcagacccacccgccatgaagccccccgcaggtaccgactaccccgctcgccggacccgggcgtcccctgcaccctcgctcctcccggggtcgcgacttgggcctaaggctggagcgaagcgacccccgagccaccctcggccgggctggaggggcagcgggggaggtggacgaccctgctctctcgtttgccgaatgaatgaaccagcttttccagcgcttcattcattctgcaaagttgatggcgcttcccttccggatgggtcgggccccgtggcggaccctggggaggccgtgatttaacgactccagtcccgttttcctggaattctagagccacagacagacattcaaaaattaaataagagaggatcgaagatagggagggatcggtgctctggtgcagataaacacgaacggggcagtcccagggacacgtttttagagagagggtggttcctggggggcttttctgaagaggtgagcgtcgacttgcttgattgggagaagcaagtgtcctgccaagaccggggaaggaggcgtcccgggaggagggaacgtgtttggagagcagaaagtcagtttggctggaacgtaacgaggggaccttttaattttgttatttatttactttgtctcccaagcgggagtgcagtggtgcgatcacgactccctgcagcctcgaactcttggactcagtcaatcctcccgcctcagccacctgagtaactgggactacaggcctgcaccaccacacttggctaattttttgtagaaacgaggtttcgccatgttgcccaggctggtcttgaagtcctgggttcaagcaatccacctgcctcggcctcccaaagtgctgggattacagacatgagccactgtacccagccaagacccttttaatttagaggcaaaggggcgatgtgacctgtgtactgtttatttatttatttgttggtttattttttgagacagtctgtgtctcccaggctggggtgtagtggtgcaatctctgctcacacaggctcaccgcaacctccgcctcccgggttcaagctatgctgcttcagcctcccaagcagctgggatttcaggcgcccaccaccacacctggctaatttttttttttttttggagatagagtcttggtccgtcacccaggctggagtgcagtggcgcgatctcggctcactgcaagctccgcctcccaggttcacgccattctcctgcctcagcctcctgagtagctgggactacaggcgcctgccaccacgcccagctaattttttttgtatttttagtagagacggtgctagccaggatgatctccatctcctgacctcgtgatccacccgcctcggcctcccaaagtgctgggattacaggcgtgagtcaccacgcccgtcacacctggctaatttttgtattattagtagagatggggtttcaccatcttggccagggtggtctcgaacttctgacctcaagtgatccgtctgcttcgacctccgaaagtgctgggattacaggcatgagccaccgtgcccggcctgggttttagaaggtcactcaggttgttgaagcaactccttgcctgatccttggcttttctcttgcccagccacactcccccagctctttgtccagcccattgcgatgagggtgataattgtaataatgatagtcagggatattcaggccttgggaaggaaggaatgttgtctgccttgtttgctactggatccttggcacaatcagtaaatatttacaggatgaactgacgtccacaagtttttcaaatcctaactcctgcaggagaattttctgacagttccagttcccatccatctccatcctttctgagcccctgaagctcttctttaccccacggtttaatgtagatccacagtcccttttttgcagttctaaaatcctaaatactctgtaaactgaaaggtttgccttaagtttacagcaaagtcatttggccagaaaatgacctcaactgaccgactgagagcctttctttttcccacttagcgaatatcattgattctcagctggggtgattgtgctacctctggggacactggacggtgtctggggacatttgtggttgtcacagttggggggcgctcctggtatggaatggatggaggccggggacgctgctcagcaccctgcagtgcccaggacagctccaccccagaaaacgatccggccccaatggccacagtgcagacagagagacaccctggtgcgtattcctgcatctcactgcagaaagagtaatttgatttcggagtgctgcctcagcctccctagtgatttggaatacatggcacttggactctattaatactgttctacaatggggggaaattctgaatgttaaaatgtccccggccccaagactttttggacaggagagcatggtctgtaataacagctacctcttgaaaactttctggtggtattcaggatacaagatgttttgccttcatacctcactgaattcttagacagttcttgttctctgcaccctgaattgttcccgttttgcaggtgggaagcctgagagttaatgtttcttgccagaatcccagaactagcaactggcagaggtggggtccgcacccaggccatctgacttcagcttctgcgttctgagctagcttgttgtgcctgccccagcctttgtaaaaatgcacatctgattgttagtgccactgtcccatccccttcctgtccctttccagggctccaccttgcactcaggattgaagttcaaagccttcattgtcatctacaccaggagttggcaaactccagcctgcctattttttttgagacggagtttcactcttgttgcccaggctggagtgcagtgctacgatctcagctcactgcaccctccacctcccaggtccaagcggttctcctgcctcagcctcctgagcagctaggattacaggtgcctgccaccacacccagctaatttttgtatttttagtagagacggggtttctccatgctggccacactggtcttgaactcctagcctcaggtgatccacccgccttggcctcccaaagtgttgggattacaggcacaagccacagcatccggccaagatggagtcttgctttgtcgcctaggctagagtgcagtggtgcaatctcagttcactgcaacctctggctcctgggttcaagcgattttcctgtctcggcctccagagtagctaggattacaagcccgcaccaccacacctggctaatttttgtatttttagtagagacggggtttcaccatgttgtccaggctggtctcgaactcctgacctcaagtgatccgcctgccttggcctcccaaagtgctgggattacaggcgtgagccaccgtacctggccaggcctgcctatttttgtacacccctggaactgaagatgatttttggatgagacagaaaccatatgtggcccacaaagctgaaaatccttggccctttgcagaactgtttgttggccccctgggtcctctgcagaactgtttgctggtcccctgggtcctctgcagaactgtttgctggccccctggaccctctgcagaactgtttgctggccccctgggccctgcacggttaggtgtttccaggtggttttgccaccttctctgtgccgagccgcactgacttcacatagtcgcccttcccgcagctgctctcgctgccaggagcccccgcctgccattcttgttttcaggctccatttacccgtttctcagagaggccctggtgtgagtggccgggccacatatgactcgcccgtagcacctgtgggtctggcacgaccacacgccaggctgactttcttgttgagttcatgaatggaggcctgcttgttccccccactgggtgtggggtgtggaagaagcagacagaagaagggactcctcccgaaaaccccccgatacctcacctttcccctctggcatggcaggagttgagcagtgcgtgggtggtcctggacttccccttttgtgaacacccaggggtttgtacaggctgatctgtgcatggtgtctccactctagggcagggggattttttttttttctctttgagatggagtctcgttctgtcgcccaggctggagtgcagtggcgcgatcttggctcactgcaacctccacctcccgggttcaagcaattctcctgcctcagcctcctgagtagctgggattacaggcatgcgtgccaccacgcccagctaatttttgtatttttggtacagatggggtttcaccatattgttcaggctggtctcaaactcctgacctcgtgatctgcctgtctcggcctcccaaagtgctgggattacaggcgtgagccaccaagcctggccgggcagggggatttttaacagcagtatcatctctattccgggctgatcgttctctgctggggccgtcctggtcactgcagggtactaagcaggatccctggcctccacccactccacgccaggagcatctgcaaccgcgacagccacatgtgtcctagatgtcacccagggttccctggatgggattgatggcagagtagcctcctgctctagaggactggtcagtctgtgcttccctacaagagccctggacctcactcttctggatgagaagcgggtgatcccttcctttccctctgccctcctgactttgaccctaactgaaccgaaagcagacccgcccggcactgggttttgtttctgcgtagcctgtgcaggagacatggcggacgcagcatctccgtgctctgtggtaaacgacctgcggtgggacctgagtgcccagcagatagaggagcgcaccagggagctcatcgagcagaccaagcgcgtgtatgaccaggttggcacccaggagtttgaggacgtgtcctacgagagcacgctcaaggcgctggccgatgtggaggtcacctacacaggtaagtcccaggcagggtctgtgcgtgggccgcaggtgccgagggaggtggcaccgcaggcgggagtagcccagcccgtggagccggttcagaacctggcttgaagtgtcaccagcaccctgcccctgagcacagggcagcgccacctgctcccaggctggtcgtggtggctaaatcagatggctgggcggaagcgtctggcaggtgctggtcactagaggtgtaggagagaggcagttcctcccgtgctccgctctgcttcacagcctcgtccattcaaaggactccctggttgtgtgatctgagagccggagatgagaaaatatgtctaaacagcacgcctctccagcctctcccagagccagcagccttgaaccctgaccccgtctggcctctttccctggcccgggaaggcgggtatttgtttctctctgaatgactgaacttggcccccttggcttctgcctctgcgccctccggcgggggtgacctcatgtcctcgggcgtcctcctcaccctcagcccgatcctcctcctctccttggggtccctgtgctcacggtgaggagtgaggtgcctagtgacaggggttagggacactgcttcccgagctctgcctaaggctgacagtgtacctgcctgaccaagagacccagagagtctccgcagagagctctgagtgaggcaactccccacccttccatctagcggaaggcctttttgctgggaaccatcgagaatccttgagttcaagcccagggcttctctcgtgttccaaggcatcccctgaaagggttggcctccgtggcccatgccatgaggcctccagagggtttgttgtctgggccaggggctggagggagggctgaagctccgcaagcaccccaagcctgcaggtcccgcagcccctgattggaatcctgaccctcttcccactccctctggcttccgacaagtggcttagagcccgtatgacctcggtttcccctcctcggccacgtggtggccccttgtccctcccgtaggagtctcatgaggctcaggtgataccagttccctcttatggcgcccagcggtgccaggcatcatttcccccgcccgtgccccaccttcccctcctgcggcctttcctctcctccttcacatggtggcgagactagcattaaaggaaactgaattcggccccagtgctcccctcggggcctttccgcttccctcagggtgacgcccagcatcctcggtgtggtcttcagcgccctgcaccgtctgtgcctggacacccagtctcctcgtgcctggcaccctcccccagccagggcctctccagccggcccctcgcgcccctcgccctgtgctctgctgaatgcctggcttctctctgatcacagattaagtccacttcgcccaggagcccttcctcctcctcctgtccccatgccagctgcctggattagtccctgcacggtactgacactgtcgtccctgcggtcacttgtctaatcggtcgcccgtaaatcccgagaggacagagctgattttctttctgtcttcagccctagcgtcaggcctggcccagagcccccactacaggcttttttgttgtttttttgagacagggtcttgctctgtcacccaggctgctgtagtgcagtagtgtgatcatggctcactgcagcctccatctcccaggctcaagccatctttaatttttggtagagatgaggtcttgctatattgcccaggctggtctagaactcctgagctcaagcttcctgcctgccttggcctccaaaagtgtggggattacaggcatgagccaccgtgcccagcccaccccccctctaaacacacggagcctcctccagacgtgcggagcctcctccaaacataccgaggcctggggacatttctgttgacccagaactgaggtagtggccagactgcaatttgaattcaggtctttctgctgcaaagtatatgcttttttttaaaaaaaattattattattagggtttttttttgtttgttttttgtttttttagaatgagtctcgctctgtcacccaggttggagtgcatggtgctgtcatggctcactgcagcctcaacctcccaggctcaagcgatcctcctgcctcagccttctaagtagctgagagcacaagtgtgtgccaccgtgcctggctaatttgtttttttaaactgctccattgagatatgatttgcataacatacagttcacccatttaaaccacacacttcaggctgggtggcggctcacacctgtcatcccagcactttgggaggccgaggtgggcggatgacttgaggtcaggagttcgagaccagcctgaccaacatccagaaaccctgtctctactaaaaatacaaaattatccgggcgtggtggcgcatgcctgtaatttcaactactcgggagactgaggcaggagaatcacttgaacccgggaggcggaggtggcggtgagccgagatcacaccattgcactccagcctgggcaacagcagcgaaactctgtctcaaacaaacaaacaaaaaaaaacccacacacttcagtggtttttaataaatttgcagcattgctcagctgttaccattctttcattttagagcattttcataaccccagagagaaattttatacccttaagtggtcacgctccatctcccctgtccccagccctggcacccacgcgtcccctcctgtctctgtggatgggcctgtcctggatatttcgtagaaatggcaccacatggccgggtgcagtggctcatgcctgtaatccctgcacattgggaggccgaggcagatggatcatgaggtcaggagttcaagaccagcctggccaacatagtgaaaccccatctctactaaaaatacaaaaattacctgggcgtggtggtgggtacctgtaatcccagctactcgggaggccgaggcaggagaatcgcttgaacccaggagttgaaggttgcagtgagccgagactgcaccactgcactccagcttgggcaacagagtgacacttcgtctcaaaaaaaaacaaatggcatcacacactgtgtgacttttgtgtctggcttctttctctgcatgtgacatcatcgggctgcatccacaccgcagcctgttccagagcctcattccttttcatggctgagtcgtgttccactgggcagaggccacatcttgtcagtccattcactcgtggatggaccttttgtcaattgtgaatcgcgctgctgtgagtgcacgtgtgcagattcctgtgtggatgtgtgttcatgtctcctggctggatcctggcactggagtcttgggggtcatgggatgactccattttaaagcttttttttttttctttttttttcttttttgagatggagcctcactctgtcgcccaggctggagtgcagtggtaccatttcaactcgctgcaacctccacctcccgggttcaagctattcccctacctcagcctcccaagtagttggaattacaggcacgcgccaccacgcctggctaatttttgtatttttagtagagatggggtttcaccttgttggccaggctggtctcggactcctgacctcaagtgatctgcctgcctcggcctcccaaagggctgggattacaggcttggccaccacacctggcctaaagcttatgcttttctagccactgacacttcctctactcaacctaaagcacagatgtgctcaggaaattgtaagtagtttatgcatttaaatgtgaccatcggcagctgcagctctctctggaatggaattccgtcagcctctgtttcgtcgtacccagctctgttgggtcctccttggcttggagggctttgagttgaatccttatttttcttcggtctgtaagatctccaaggacacaggcaacagcacctcctttctccatcccagggcccagcctggaggggacggtggcgtgtgcctctagtcccagctacttgggaggctgaggcaggagagagttcacggggggattcagcagacaggcctgggagaggggtccgggcaacacctgccagttgtactggggcctgttctcacacctgtctccctggtctcccctgttttagttcagaggaatatccttgacttcccccagcatgtttccccctccaaggacatccggacagccagcacagaggccgacaagaagctctctgagttcgacgtggagatgagcatgagggaggacgtgtaccagaggatcgtgtggctccaggtgagggggccctgcggggagtgcaaatagcctcccaagtaactaggattacaggcgcccgccaccacacccggctaatttttgtatttttagtagagacggggtttcaacgtgttggtcaggctagtctcgaactcctgacctcaagtgatccgcccacctcggcctcccacagtgctgggatgacaggtgtgagccactgtgcccggcccattttttgtatttttagtaggcacagggttttgccatgttggtcaggctgttctcaaactcctgacctcaggtgatccgcccgccttggcctcccaaagtgctgggatcacaggcctgagccaccacgcccggccacacatgtgcactttcatttcctttcctggccatcctagtgtgacccaaacaccccatccccacatggcgtgagctggcagggcctggcggcatggctgcgtgggctcctgctcccccggatgctcctcgcagtatgcagtggggcctttgctgttgatgtcacatgatcaggagagacccagagaccctcctgctgctgttcatcctcttaggcgaggacccctgggaatgtgctgatgtgtcccacagtctcaggatcatgcagccctagtgctttggtaaatccagatcagggtgacccatgatagccgtggattgttatttctttttatttaaatacagacagggtctcacaacgttgcccacgcttgtctcgaactcctgggcccacgcaatcctcccacctccactttccagagtttctgttgagacaatgagaggttcccatgcaggtgcaggaaagaatcgaatgcctttgccaactttgcccaggtccccagtgatgacgttttgcaaaactatggtgtcatctacaccccgataccgacctggagaccaccagcaatctaattcccattcagccatcgcactggtgaaggagctctggactgatgtcagtgtggggctcttccaaacaaagcgaacgtttgcacaggttttatgtagagacaggtcgtcatttctctgagataaatgcccaggagtgcagttgccaagtcacacgggggccggatgatcaggtttttaagaaactgccaaactgctctttggagcggctgcactggcccacgtcctacatgctttgatgtttttattccaggagaaagttcagaaggactcactgaggcccgaggctgcgcggtacctggagcggctaatcaagctgggccggagaaatgggcttcacctccccagagagactcaggaagtgagtgctgggtgtagggagtgctgggcgtgggcaatggtcgatcccggggagtgctgggcacagggagtgctcagtcccagggagtggtgggagcaagaagcgcagggcagggggagtgctgggctcggggagtgctcggctcagggagtgcttggggcatcaggagtgctgggttcagggagtgctgcgtcccggggagtgctggactcagggagtgcttgggcacagggagtgctgggtgccgggagtgctgggtgtgaggagtgctcggtcccagggagcactgggcatggggagtactgagctcagggagtgcttgggcttggggagtgctgggtggggggagtgctcggtcccagggagtactgggtgtggggagtgctcagtctggggagtactcggcatggggagtactgggcacggggagtgctcagtcctggggagtgctcagttgcggggagtgctgggctcagggagtactgggtgcggggagtgctgggcgtggccagtggagcttctgtggccccctgcccctgcctcctcgggagcgtccccccttcagggctgacccccggcctgatgtccatctttcttctgcctgaggacctgaactctggcaaggcaggtccacacagacatggggcgcagaggctcggtaacgaggggagcccctccacccactgcccggtgtgcctgatgtgggcgtctcaggggtgacatgagttagttggtgcagagctgggagcgcagcgctgaagtcaagcgtagtgtgttagcagaagcccagtgttcagcggcaccaacagagcagtggcgaccgccactggaaagatgcgtgtcacagttcccaggaactggcagctcgccacatgggaagcatggctgggtcaggaggtgtgctctgggcagggccttcgctggggtcccttgtgaaggcatgggtgtagcggggagtgggctcagggttggccggctggaccatctcagccagccctggcatgggggctgcccctcatcgggtgcctggccctagggtaatgggggccggtggatggtgccccagagtgtaggggctcgagactagttgatttgcacgtgaaagatgtttgcaggcgagctgttggctgtctctgggaggggccatttctcgagggccagcaaggcacccaaatgtcaaagcatcagaatacaggcccctgattcaccatggtgtgtgttcagtagaaaccgtgcttggaatgctgatctttccgaggccggccacttgggcacttgctgtcctgtgacgctgggcgccagccacagctaccagctagcctgcaatgacgcaggcaaactgaaaaccgaagttacatgagatacccaacacctcatatccgatagcctttgccttcggcgatctcaccagaatgtgggctgctgtgagttcctgagcacgcttaagacaggccaggttaagctgtgatgttcgctcctattaaatgcatttgtgatttatgatattcacaactcacgatgggattattgggacatacccctgtcctaagtcagggagcatctgtacaggaaagaaagcacacagttcaatcaggtcccaggctgcagccatagccccatggctgtccctgttccggttccataaagccaccgctgtcctggttagggggcgtctccaccttatggctgaggcaaccaagactcagagaggccaggtgggtttgtcagtgaaaccagcactgacgaaagcggagtcagggtccgtctcagtactcggggactgggggtcctcagctcagccgcagcggacaagagccagttatttttatttttatttatgcatttatttatttatttagacagggagtcacactctgtctcccaggctggagtgcaacggtgtgatctcagctcgctgcaacctctgcctcctatgttcaagcgattctcctgcctcagcctctggagtagctgggattacgggcacccgccaacacagctggctaatttttttttatttttgatagagacagggttttaccacattggccaggctggtctcaaactcctaacctcaagtgattcacccgccttggcctcccaaactgctgggattacgggtgtgagccactgtaccacagttatttttaaaaccccttcggcttgttgcatgcccagcatgtgtggccatgtgcatggtagaagccacaaactctcccacaagggccagcaagcaaggagggagcagaggcagccccgcctggaggacagaagcgcggaaaaggtgcgaggtccggatgctggcgagcagagttccagcgcgtccccgcggcccttagggccagcgctgtgtgctcattgagtctccagagccttccctggcatggctgggtttgttatgtgagatggcaagagggggagacattgggaattgcccagcatggggcctgttcccaggagaggcccagcaaaccctcagctggttctgaaccagggccttcctgacaagatacaggctccctgcaaagtcctgggcacagtttccccctgctgccgccctctgtcctgcggatgagcatttctgctctggccccatggagctgggctccagacccgcctggcggagcttccagcaggagaatctgagtcaaagtacagccctgctgccagcctgtcatgtgtcatgtggcctcaagccaggtccttgtcacatagtggtcacctcccagccttcaaggccaccagagggaccactcaagattcagttcctttgttgatatcccatatcaccagggtcgagttttagctgtttctaaaaccagctttaccagataaggggtaaaatgttcaaaagctgccagacacggtgactcatgcctgtaatcccagcactttgggaggctgaggtgggaggattgcttgagcccaggagttcgaaaccagcctgagcaacatggtgaaaccccgtctgtaccaaacatacaaaaattagctgggtgtagtggcgtgtacctgtagtcctagctactcaggaggctaaggcaggaggatcaattgagttgggaggttgaggctgcagtgagtcgagatcatgccactgcattccagcctgggcaacagagcgagtccctgtctcagaagaatgttgaaaagcttaggctgcaggctctgaaggtgattccttaatggataggagggtctggagcactcttggccagggccacacctgacagaccggagcacatccctgaggttgcccgaggtcacccagctttggatgccgcagctggtgttgaaatccacactgcgcagcctcgtggcctccgtgtctgtctgtcctccgcctcccgtctcactctttcctcctcggttgcctcttctttcggcctggttcttggggaaatccctcagccctcggcgagagggttcccaggcgttgcgtctccccgcggagcccgccccggtctctccctcccctcacgccccgcctttctctccagaacatcaaacgcatcaagaagaagctgagccttctgtgcatcgacttcaacaagaacctgaacgaggacacgaccttcctgcccttcacgctccaggagctaggtaggggccgagcagtggggcacgggtggccatcggtcctgggactcagtgcaggcctgccaggccctcgggggccgccgcttcctcctgtgggcttctgtgctgaagggcggcgggaggccgaagtacgtggacctgaccgccctgggctgaggactttcctcaccggaagcgctccagggccgtttacagccaaaagctctgagccctccttggggagggccatggtctgtcccaccaagattccaccctgatagaaaatgtccctggcagtggcggaagcccaggccggacggggtggccaagggtgccagtctcagccatggccctgagggaaccacaattttcccttgagaccccacttcctgcctgcctttatttatttaatttaattaattaattaatttattttgagatggagtcttgctctgttgcccaggctggagtgcagtggtgcgacctccactcactgcaacctccgtcccccgggttcaagtgattctcctgtctcagcctcctgagtagctgggactacagacgtatgccatcacacctggcaaatttttttatttttagtagagacggtttcgccgtgttggccagggtggtctcagactcctgggctcaggatctgcctgcctcaacctcccaaagttctgggattacaggcatgagccaccgtgcccaggcaggccggaatattctgatgggtgctatagaatataacctccagttctagactctgaatgtagttgcctctgaggtggtgggtggggacaaggccctcatggccggaggcctccgcaggtggcttgatgtgtggtcacctgggcgtatgtttcctgagggaacactcgcaggtcgggcactgccaagcttggctgccagccacttgctcagccctcccgtgtctcgggcagcacatcctaccctcagcttctggcactcaggagagacgacgggctacaatctgccgtaaagcacgtttcccagcctgcccctcagtgggtgcactgatcacccgcaccattcccgcagccacccacgccatcccgcggccacccgcaccgtccccgcggccacccgcaccatccccgtggggctgcttctcctgcctgctcgtgttagcaagcagaaggactcggtgcctgatgttctagaagccaatgccatggcaccaaggatttgaggaaacaaaagcttctcattgcaagtgactcccaaggagactgggcgtccagctcaaatctgcctcctgtgccagctttcaggcagtactttcatgagagaaggtgcagaggtggattctgggattagcaggtgattgttggaaggaaaggggaggtctggaaggtccttgggcacgcacagttatctgtccgtgccagctcgtgggtcctgggtgtgaatcctggggaagtctgtatgaagcgcggtggaagttcagttggcatcagccagctggttctgcacagactctgctggctcatgtgggttccagccggtttcagccagttttgttcttgtcggcgtttcagctgcctgtttcttttcacgtttgccatcctgcaaactcgaatgtttgtggattttggtgtctaactctttggggtgccgttccatttgtcgggcctgaggggtctcccgtgcaggtggcttgagtcccatgtggccaggtgacaccgtcatgcgggtggctagcgtgttgggtgacagtctccagggctgtccgctgctgctgccccgggacctgtttccctttgtggtccgtcatttctcaggagacgccttgcgatggtcttagttccttttcttctgcttacaacagaaaacctaaggccatgtagtttataagaaaaggaattaacttgtcacagctctggaggctgagaagtcccaggtcgaggggccatatctggccagggccttcttcctggtggggactctggagccctgaggcggccagggtgtcacatggcaaggggagggggctaagcgagccggttccacccaggtctctcctcctcacaaagccccaggccctctgccacattaacccatctgtcccttcatccatgaatccatgaatggattcatccattcctgaaggcagaggccacatgacccagctgcctcttgaaggccccagtacctaatcctgccatctcccaataccaccatctccaacaccgccatctcccgatacccacatctcccaatacccacatctcccgataccgctacctctcaataccgccacctcccaacactgccatctcccgatacccacatctcccaatactgctacctctcaataccaccacctccaacaccaccatctccaacactgccacctccaacaccaccatctccaacaccgccacctccaacaccgccgtctcccgatacctccacctccggacacccccacctcctgacccacccacctcccaacaccaacacctcccgacacacccacctcccgacacccccacctcccaataccaacacctcccgacacccccacttcccgacacccccacctcccgacaccaacacctcccaacaccaacacttccccacacccccacctcccaacactaacacctcctgacacccccacctcccgacacccccacctcccaacaccaacacctcccgacacccccacctcccgacaccaacacctcccgacaccaacacctcccgacaccaacacctcacgacacccacacctcccgacaccaacacctcccgacaccaacaccttccgacacccccacctcccgacaccgccacctcccgatacccgcatctcccgacaccaccatctctggcattaagttcctggtgcattttggaggggacgcacccaaccagagcagagacctgtgagtgtccatcactcgcacattgtcatacactagttgccatgtccatggatgacttctgccgccctcaccctctgggcatcagtcatcctgccgtgactccgaaccttccctccttgcctgtcttcttactgatttgtttctgtccgtgtgcatgaggcttctgtcttattcccgggttatcattcattatcatttatcccagtgctcaaatcgtcccacatggaccctcaggagtccctccgaacaatccctgtgtccttgtaatgcacctgctgtcctctgaacctgctcttactgtggggcacatggtaccgcaggctcggcctctgagcccgcgcttactgtggggcgcgcggtaccgcaggctcggcctctgagcccactcttactgttggacatgtgatgtcgcaggctcgtcccatgctctccctgccccagccctcagatgctccatttcttggaggagacctggcgcctttgagtggagggtgacttaggcaccggatgtgttcaccactgccagggagcagcattcctgggcaccgttaacagttaggaagcagacacgcatctctgcaccacacatggacacacacactcttctattctgtgtctgtatatcaaatccacaagtgcagcggggcatgccggcacacacctgaggtcccagccactcgggaggctgaggcagggggattgcttgagtctgggagttcagggccacagtgaacgtgaactatgcattcgtgaactatccattgcagcctgggcaacagagcaagaccctttttctaaaaaaataaaaacttccaggagtccactttgcagcttctcttccagtccagcgctgctgggccccccagctgtctcccttgctgtcctttaactcccgtctccgaccgccagccgtcactcctgggtgacacactgtcgagatggagagctgctgtttgaaggcccgtggtccttggaaaggacgatgtgcaggtcccgggaggcctccccctcatgctgcagtcactcggcagacaattgccaggcccacgctggtgctggggtacaaacgggaaggcgggggctctgccggccacaggactctcagctccctcatcaccacccacacccacgggctggcctcccaaaatttcccccatctgcctctggccccccaaccggatcattctttccacccttgcctccctggggtccccgtgagctcccgatcattctttccacccctactgccctggggtcggggtgagctcccaatcattctttccaccctgaccgccctggggtcggcgtgagctcccgatcgttctttctacccctactgctctggggtccgtgtgagctccggatcattctttccaccctgactcccctggggtcggagtgagctcccgatcattctttccactctgaccgccctggggttgaggtgaaccagtctttgcattgaagctgcaagcctgaggcacggtggccctggcgtctcccgagccatgaggtaggaaccccagagggtttcagtccgggatgctgccgcccccacttctcttgaggctgtcgggcaggggccaggtgggagggtgtggctgccgggcagcggggtgaactgtgtcctgccaggggttttgtgggtggagaagggacagcagggctccagtgagaagctctgggagtaggaattgggtctctctggagggacacacttgaaagtggttgagccgtggggctgcgtgctgagatctcagctctgagcgggaggctctgcctgggggtggttcttcaggaaaagcaaagcaggacctccctctccacgtggggcctccctctccgcccagggcccagcgtgctcagctctcctgctgtttttgtctttgatgggaggcactgcctctaacgctggtttccttgtgcagtggccgggccacccttcccgccaccctcctcccttcacacatgaggttggtgacggcgccctggaagcccacgatgtccgggggttgggctggatttagctttaacctctctggggcaggagatcctgctctgaggatgctggggggtttcctggtggggttagaggcgggacgtgagaaacgtggcaggtggtggccaggctgtgggggagccagggtatttcttgatggggttagatgggggatgtaagaattgcagcgggtggtggccaggctgcagctgctcgctgagggcccccttgtagctttccaggcagaggggaagcccaccccttccctcacacgctgtgtgcaggctgtgggcccatcagtcctgtcaaagccaccctggttctgtccccataggagggctccccgaggactttctgaactccctggagaagatggaggacggcaagttgaaggtcaccctcaagtacccccattacttccccctcctgaagaaatgccacgtgcctgagaccaggaggaaagtggaggaggccttcaactgccggtgcaaggaggtgagaaggcacggccagggggccccagaacagtgggtctggagcttgtggggcccgtctgctccatgtgtgtgaggcacctccaggctttgcacttggatggcctcccaatctccctggccaggcccagtggccagcagaggcctccctgtggggctctgccgtgccctggaggtgtctgtgctgggctccacccagaccctggggccacagctcagggcccagttcatccttcccaagctgagcctcctgctgctgctctgagcatctggccgcgcacacgtctcgtccctcccttatctggagccgcccctcaggtgtgtcagcccagatcattccttttgtcttaaatgatggtgcccggacctgagcctgggtccacaggtgggttgtgactgggctatctcgctgtgactggcgtcagacggccgttcccacagggacacatgtaactgtccacggcgccatggtgtggtcggtcaggtggtctctgcacgtctcccattcgccatctggaacaggcagaggctctaggagtgggcctcttggtcccctgacgacaccaagttggtgcttgtgcggctggcaaaagggggatacacgctgatcactgcaaagggatgggcgggcactgatcactgcaaggggacgggcgggtgcccatcactgcggggggacgggcgggtgcccatcactgcggggggacgggcgggtgcccatcactgcggggggacgggcgggtgcccatcactgcggggggacgggcgggtgcccatcactgcggggggatgggcgggtgcccatcactgcggggggtgggggacgggtgggtaccaatgggggtacaggtgggcaccgatcactgcaaggcaggggggtgctcctcgctgttcagggaccgggaactcagtctgctcagatggggcgtggcctgccctctacatgttggctatgaattcatgttgctgttaagcctaagtaggtggacccgtggactgggcacacctcgacttccccactgcgccttagaaggtcaactgggcaatcccgtcctggtccccaggcttgggtcctagtggcagagtgagggccaggccaagagggcgcacacgggtgggctgagttccaggtcccgggggatgtgccgcctcagagaccttgctgctggcggtcggcctggcccctatttggctggctgctctgcacgcacctgctggttacagctgggtttcctgtggacccagctggtgggcacatctgtcctgaacaggcctctgtttctcctcgtaaacgcctcacgtggctttcatgcgtcctcccccacccccactggcttggttggcagtgccagtcctcagaagtgaggctgtgtgcatgtcatttgctggtggcgataggcagagcccgtgagactgggaaccaaggcctggacatggaggtgtccccacatgcagcagtgatgccctcggaggctcctcggacagcccctggtccccataccacgttccgtgtgaggccttagagtcatctgcaccccttctggttccaaaaaggccttgggattatgataacgctggtggcatgaccagaggagttgtgtagtaacacaggccgagaggggcagggaccggaggtcagacggagctggatatgagcctttggccctgggacagggcgtgctggccctggaggtggagggagtggcgcccctgggtgacagtgtggtggtgtcggttgcaggagaactgcgctatcctcaaggagctggtgacgctgcgggcccagaagtcccgcctgctggggttccacacgcacgccgactatgtcctggagatgaacatggccaagaccagccagaccgtggccaccttcctaggtagcccttccttcctcctccactggggtccctgtggggaaggttctcagggtcaccccaggggacagtcggtgctacccctagagccttgtcctttccctccatgaagagggacttctgacgcctgccctggctccctcactccccccgagggacccttacagaacagggaagcgcccgggccctggggtcagtcccatgcttgcacccggccccgccgccccctcaccctgagcgtgaggatgctcggcccctcgaggggttgccgggaactgcgggtcctcccttccaaatggggagcctgacgaagtcgcggccgcgggcgggcgagcccagagccatggaggagcccgcgaggcgagaggcccacctttctgccctccccgcagatgagctggcgcagaagctgaagcccctgggggagcaggagcgtgcggtgattctggagctgaagcgtgcggagtgcgagcgccggggcctgcccttcgacggccgcatccgtgcctgggacatgcgctactacatgaaccaggtggaggagacgcgctactgcgtggaccagaacctgctcaaggagtacttccccgtgcaggtggtcacgcacgggctgctgggcatctaccaggagctcctggggctggccttccaccacgaggagggcgccagtgcctggcatgaggacgtgcggctctacaccgcgagggacgcggcctcgggggaggtggtcggcaagttctacctggacctgtacccgcggtgggtgagggcagcgggggcggggggcgcaccccggccctgggtctcctcggagcccggtgtgcccgtctgagatgggaaggaagtcgttgcctgctccatggggcctcggggatgaaccccgagacgtagcacccgtgggcacaccacaggggccgaaaatgcagctgtccccgtttccagtctcactcagccaccccgacagggcgcagctctgcccaggccggagtcctttaggggagggatggcagccggggcctggccgtggttttcatgctgccctgcgccaagccacctctgctgagagggaggtttagaacctcagaggtgcccggcggtctgggttagcagtcaggtgggctgagggatgcggagtcagggactcttgcggtgtctctagtccctgcggggcctgacgctgcctccctccccagggaaggaaagtacgggcacgcggcctgctttggcctgcagcccggctgcctgcggcaggatgggagccgccagatcgccatcgcggccatggtggccaacttcaccaagcccacagccgacgcgccctcgctgctgcagcatgacgaggtggagacctacttccatgagtttggccacgtgatgcaccagctctgctcccaggtgggtgcgggcccgggcaggggcaggggcaggggcaggggcaggggctgcctgtggtcagcgaggcccaagcctggggcttcggcttccggctctctctgcacccgtccggtggctccttcatccaatgccacccaaagatggtgactccctgtcatgcccgtgtcctggggctgccccagcaaaacaccacagaccagggcttacacaaggtgcgtgtatttcctcatggtcctagaggctggagtcggaggtcacagtgtcagcagggttggctccctcgaggtccctccttggcttgtggccgccaccacctccccgcatcctcatgtggtcgtccttctgtgtgggtccccatctcgtcttcttacagggaccccagtcatgccggatcagggcccgcccaacaacctcacttgaccgtagtgacctccttagacatcctgtctctaagtagtcacatcctggccaggcgtggtggtccacgcctgtaatcccagcactttgggaggccgaggtgggtagatcacctgaggtcaggagctcaagaccagcctggccaacatggtgccatcttgttgcaagcatctgtcctagcacacagtcagcaatcgctcctcagaaaggctctgtcctatgaagtcactgagaaccctgagaagtgcatgcagacctgtccctccaaggggaccctggtcacgtgttcgccaactgatcattccagaaccttactgtgtgtgttttgggttcaagacaccttactgctgtacagcgctgacgggttcacgttgaacacatggctggtggctctgtcacccacacctgagcacagcttgcacacacagggtgtccccatgaggcacatcatggcctcctggtgctgaaggagacgagacagtgctctgcacaacgcttggggccttttaaacacaaaatcaccaagagcagaaagatgcaaacaccgtgcccccactagactgagaaaaggacgcttgctcataaaatgagccgaagtgagaagacagagtgcggcccttctgaggaccgtctgctcaggggcgccgcagtgctggcctctggggtttttgtggatcttagtaggcgagtttgaaaacacggagtccaggaatgaggatcgaccgtgtgtccacctttcctggcttccctgccacactgtttgcacagcactcgtagccagcacacgcgtgtgcacatccacacaggtgctcacacaggtgcccacgcacgtgcctgcaggcctgctttgcatgctgctttctgcgtgtccctggcgcctggcacggcgagtcccttggtgcattccgtcgggacaaggagtgtggctgcgtggtccttggaacagaaaagcctcggtgttgcagagaggaccttgaggatcacccaggagttccctcgccgttggctgcctgccatggttccagcgggactcagtcaagggctgtgcttttagggaaggttccacacacacacgagcagggagatgcagcatgcctcacagcgtccccacccggacctggccgtccccaggtcccaacccctcggggtgcggagctttcagggagcagcagctctgtggctagaggagaagcgtgggtggcctccagggacggggtcatgtggccggcatcttcaggtgtgtcctgctgccaccggcagccagcagcagcccaggggcctccgggtcccggtcgttttccagttttggggtgggagggccgggcccagcgcatcacctgtgcactcgccctgtttgcactgtggcagctgacacgggccaggccggcgggaacgggctaggcaggacctgggcactctgaggctctgccccatccctgcaggcggagttcgccatgttcagcgggacccacgtggagcgggactttgtggaggcgccgtcgcagatgctggagaactgggtgtgggagcaggagccgctgctgcggatgtcgcggcactaccgcacaggcagcgccgtgccccgggagctcctggagaagctcattgagtcccggcaggccaacacaggtgcacccgccccgtccggggaagggtgctaacctcggggggcggcacacagctggggcctggcatgtgccccgggtgggggtcggagctctgggcagagtgggccggggcaggtgcagaggccagctctctccttccctcccgcccaggcctcttcaacctgcgccagatcgtcctcgccaaggtggaccaggccctgcacacgcagacggacgcagaccccgccgaggagtatgcgcggctctgccaggagatcctcggggtcccggccacgccaggtagccacccttgagccgggcacaccctggaatttggagcctcagctgcttccctgggaaggtgaagggagttggtccccatgcttcacttagcaagtgcaggagtccctgctggggagccacggagcgcgtcccaggctcctcgggggacagccccagctgagatgcagctgcaggcccagggtcggggacgggtgtgcggccccagcccccaggaggagtgtgttccctggagcctctgctttgaatgaagctggcgttttcctgattgaaatgtatgacacatgctttgtaaaaagcctggagaagtacaggaaggcctaggaatttccgatcctaatgatgagaagtgggccctgtttccatgctcacctgttgtcctgtgtgcatgtgtgttcacacacgcttgcgaggatccagaatttggaaatacagcatgattttaacatgggtggtgttttgctggcttaacactccatagacttcaaaaatctttccaaaagcgttttcagcagcgtggcctgtgatgttgcgtgggcgtgccttgctttattgacgcagtctcaaaatggggactttgctctgtggcagctgacagccccgttaaatgagctcctgtccttccaggagagggggcggagacttgtggccctcgctttgtggctgactctggttctagaagtatccagctggtctcggccctcaccgtgatcctccagcttctccctgttccgggcaggggtctcaggagtctggctggttgtcttctcctggaggaggagcatggggtgggggctacagcgtgaaccctgccatgtgtccgccccaggaaccaacatgcctgcaaccttcggccatctggcaggtggctacgacgcccagtactacgggtacctgtggagcgaggtgtattccatggacatgttccacacgcgcttcaagcaggagggtgtcctgaacagcaaggtacgcggggactggggacagggagggcgtcctgaacggcaaggtacgcggggactggggacagggagggcgtcctgaatggcaaggtacgcggggactggggacagggagggcgtcctgaacggcaaggtacgcggggactggggacagggagggcgtcctcaacagcagggtggggccgagaaaagcacacctttggcctgggcctgggtgtgccgggtgagccatcccggccgaggcacctgctggtcttggtgcggtgctgcccacagctcctccctgggccctgcaggaagctccacactggcccctcaggcctcgggctgtgagtgctgggagctccgtgtcttcccatacgagtccttccgggatctgcgtgatcggcctcagagccatgggctgagacagacccttctctggagaaggcttggcgtttgccattcatttgctcctccaacctccagtttcctcactatgaagtgcggccgttacgccatgtgagcctgtgcctcccgctgacttggtgtgacccaggctcgggacagccgccagagtccctcacaaggaacaggtggctaccagctttgagggccggccctgccctgcctgggtgcaacattgcactgggcagcctgcaggtacctcggagccaccaagcaggcactcagctgctccctttatagaggtgcagaggccaggacctgggggagcaatggtccgacaagccccctgtcttcacagcccagcagggacctcccccctcctgaggcagcctccagcagctccccctgctgctgaggtgagggggtcccacctctgaggaccggccgggggctgtagaggtggagtcccccgggtgggagctgggactgtggctccctggctctgcagcctgcagtccgcgcaggctcctgcggggctctggggcgtcggggtctccttggtggctggcaccggcgcctcgcagtctcatctgcctcacctgcccgtagtcccgcagtcacagggctgggctcaaacctgggcctttagggcggcccagagcgcgagcggcttccacattgtccagccggaggctcagccacttctgttcatgggctcagcctgggatttcagtgggggctgatggcgggagccacctcgggagtttggggagttcggggctctgctggcccctcagtgcacacccccgctctgagattctgatgaaaggcacctgcgctctcccacctgtgctgatgcaggcggcccccgggcctccctgggaacctggaaggggttgctccgaggcccccctgggcgagggtgtgcagactcctggggtcctctgccttcctccctgggtccccacccggccacagtgccctgtctcctcggcaggttggcatggattacagaagctgcatcctgagacccggcggttccgaggatgccagcgccatgctgaggcgcttcctgggccgtgaccccaagcaggacgccttcctcctgagcaaggggctgcaggtcgggggctgcgagcccgagccgcaggtctgctgaggcctggcactgcgactgcccagtctggcctgcgctcccgccgccctggtgccttagcccccggcacaggatggggcaggctctggcacagtgcctgggactggcagggtggctgagcggctgtcttgcctcttgtcattgtctgtccccacccggtcgtggcccacccggctagagacggcgtcctcaaggcatctggagggctttcgtggctgccagggcctggtctttgttgcactaacacgtctcctctctgggaaacgtcccttgtcaggagacggctcttctttgaaatgaggtcattaaaaggaaacagaaaaagagagaggctccctggcctggtcactggctcctgcgcttttttggtccgaggacggtgggacggcgggtcagggtccagccctcgggctgttgccacaccaggccctggattggggctcaggtccttgtgggggcggggggtgggggagtaaagggctgggaaccagttctgccagccaggccggcctggggggtctgagagacttcggcttcctgcatgcttctcacctgttgtcattctggaacattccccccgccctgctcagctctggccatcaaggaccaggctccactggtcagagagtctggaaagtcagggcaggccctgtgcgcacaggcagccggggcggggctgggggtcagcagctgcccaccctctcatccacaggggaaggccgggctcactccagcttcctaggcagagtctctgggggttcctgttggacacaagtgaaccaggtgaaccagggcagctgctggaagctcggccatggccctcatcctcatggccttggggactgcctgtgcctgccctccctggcggccccactcccctggctgtgggcaacatggcaaagtcttgatcgggggtgcagggtcgggggggcgcttcctggaccctccaacagtgctcagagatgcctcagggatagctgtcggctgtgtccccacctcccgagcaagacaagtggatgctccccgtctcttcagtcccagtgctctgatgttttctcccgcgactgtgagtttctcaggagcccccctcgtgccctgggagcgtccctccccagtcttagtcctccacgaaggacgctggtcagcagaacctgtgaccctgcttcccgaggcctatgggtggccagacatccgcctcgtcctcacctccatttggacaggactccgagggctgtgccatctgcttcagcccctcctgtcccattcccacccagcccaggtcagtgtggctgtggccactgccatggggcctgctttgcaccttacgcacgcctggctctgctccatgcacctgcttctgtgtctttccaactctgggggctaaggggtgagtcttgtctttgcagagctggacggcacagcctgtggccaggagggttatgccagcgaggcgggaatccataagtgggaacaccacagtggtcacgtttcagatactcacagctcagagcgggtcccatagcttgcacctgaagccccaactactcaggaggctgaggcggaaggattgcttgagcccaggagggcaaggccagcctgggcaacgtggcaagaccccatctctaaaaaaaataagttcggtgggtgtggggccagtgcctgtggtctgttttttgggaggctgaggcaggaggatcgcttgagcctaggaggtcaaggctgcagtaagccgtgatcccaccactgcactgcagcctgggcaacagagcaagactgtctctaaaataacaataataataaaatacctggggttcagaaaagaaaagctggaaggcaaagccgaccgcactgggcagaggtggagatggcaagtctgggggctccctcatcttcccctgccccgagccctcaggtggcctccacctggtccccagcgaagtcccagttgtgcaagagcaccccagctgggccctgggccatcacagccttgtcacacacacagcctggcccatcacagcagagctggggtcacagccttgggctgctgggccgtgggcggatggcctggaccatccacaccccactcccctggaagtcaccaactgggcttagttgccggataccccaggcagccccccgcggtgcttcgcaagttgggccgcctcccccagcatgtcccctgctctgtggacacccagggatgtggaggtagtagcacagagtctcggtccagggccctgttccccagggagctgggcgtcctcagagccttcccaaatgcccacaccgggggcacccgggtttccccaaacactccaggacagagcgggggctttgatcacagggagggggctgcagagctgctgtgtctcctggctcctctgccccatgctccccactcagggctccagcagtgggctcagaggacagtgtggcattagcatcccctgcccgtccaggttgtcactctccttggccccttgctgctccccagtggaaaaaaaagggggaaataaagaatcgtaaaaaatacatatattggaacctgtatgttttgtgatcttcgcaacatttctctgtaaactctccttctttaggtttttgacaaaacctgaatgcagaagtggtctcctccccagtcacccgtccagcccccgtgggctgtccccaggtgtccctggctcttcatccccacaatcctgtccctgcctgtgctgcctccaacacacgcgccccaggctttgtgcctgtggttccattttggtccttcacgaagtatttctccaaccgagaagctgctgggatctctgtggttggtggccccgagcggccccactcctctcaaggatgataccagtggggccgttgtaggcaggctccatgctgcgggctgggcaggcgcggtcgtccccatcctccccatgggacttgtgttactgtccccgtgtcccagatggggcatctcaggagcagagccagcgtcccccctcctctccccaatgagcaacaccggctgaaggccacagccttgaaagggacaggggcctcactctccagggctgtccctacttcaagggacaaaatgttttgtgaaactcagttcgattctgagattaatggccagcttgcgggtggtttgagccctgggctggaaggcaggaggtctgggttcaagtctccaggtagacagggcccagggatgagttccagcatgggctaggggccagggtgctgcccacgtggctccctggggaactgggctccctgtggccatgcagagagctttctggcttttccaggctgcaccagaccggtgtgatgctctcctcttcagaccccagactgcccttgtgtgttccctcttgccccatcctcagctcaggaggtcagggagacggagctctgtcccaaaggccatcctgtgcccccggccacctctcatcgttggtttgcggatgggctggtgacctattttggagcacctacatcagtgccgtcctccagtctgactcggtttgaacgattagagaattttatttttccctgaacttgaaattgggaggagggaatgctgtcggcacgtggaggtgcttggagtggggcctgccaacccggaggacgctacggctgtgatgaaggctaccccactacatcgtccaagcacctccaacccagtttacggtggggtccggacctgcccctgaacttggcggttatgtgagcctataaattcccagttattatttatgtttttattggctgggcacagtggctcacacctgtaattccagcactttgggaggctgaggcaggcagatcacttgaggccagaagttcaagaccagcctggccaatatgaggaaaccccgtctctactaaaaaatacaaacatttagtcagacgtggtggcccttgccttagtcggtgtgagaactgactaatgcaattagtgagactatattatgaacctttatagtgttagaaataaattttcggtgccacaaaagaaacagcactcgaacattaattttctcagcacggcaattttacttctatagaagggtgcgtctggcaggtggagcccagcgccgcgctgcggggcctgctgggacttgtagttcacaggctcagggtgcgcaggcgcaatgccgagtttgcctctgcgcgagtcggggttggcggcgcctgaacgagcacacctgaacgagggaggagaaggggttcttacccctgacgcaggtacccctactgctgtgttgttcccctattggctagggttggcccgcacagtctaagctgattctgattggctgttttaaagagcaggggtatgagccagagtggcggggtgagtagtttggcaggaaggacggctacagaaaaggtgactcagaatgactaagaacagagcaggtgaccaaggataactaaggtcagagcaggtgacaagggtgactaagaacagagcaggtgaccaaggataactaaggtcagagcaggtgacaagggtgactaagaacagagcaggtgaccaaggataactaaggtcagagcaggtgaccaaggataactaaggtcagagcaggtgaccaaggatgactaaggtcagagcaggtgacaagggtgactaagaacagagcaggtgaccaaggataactaaggtcagagcaggtgaccaaggataactaaggtcagagcaggtgaccaaggatgactaaggtcagagcaggtgacaagggtgactaaggtcagagcaggtgaccaaggatgactaaggtcagagcaggtgacaagggtgactaagaacagagcaggtgaccaaggataactaaggtcagagcaggtgacaagggtgactaaggtcagagcaggtgaccaaggataactaaggtcagagcaggtgaccaaggatgactaaggtcagagcaggtgacaagggtgactaagaacagagcaggtgaccaaggataactaaggtcagagcaggtgacaagggtgactaagaacagagcaggtgaccaaggatgactaaggtcagagcaggtgaccaaggataactaaggtcagagcaggtgacaagggtgactaagaacagagcaggtgaccaaggataactaaggtcagagcaggtgacaagggtgactaagaacagagcaggtgaccaaggataactaaggtcagagcaggtgacaaggatgactaaggtcagagcaggtgaccaaggatgactaaggtcagagcaggtgaccaaggatgactaaggtcagagcaggtgacaaggatgactaaggtcagagcaggtgaccaaggatgactaaggtcagagcaggtgaccaagggtgactaaggtcagagcaggtgataggggctaggaggggttgtttactgaaactaggggcaaggaaacgaaaagaacgaggaagttaaagtttaaaatgaagaacaaagaataggtggccgggcgcggtggctcacgcctgtaatcccagcactttgggaggctgaggcaggcggatcacgaggtcaggagatcgagaccatcctggctaacacggtgaaactccgtctctactaaaaatacaaaaaaattagccgggcgtggtggcgggcgcctgtggtcccagctgcttgggaggctgaggcaggagaatggcgtgaacctgggaggcggagcttgcagtgagccgagatcgcgccgctgcactccagcctgggcgacagagcgagactccatctcaaaaaaaaaaaaaaaaagaacaggggagctgaatatacggaaacattggttctttggagaggagctcataactgattgtacttaacaatttacaggctaaaacctttgaagaggaatttgttgtatcctacaacagtatattaattatagtagttttactattttaatttctcataaataacaatcagtagaatattaaataaatatttaaacaataatttaatttggctgggcgtggtggctcacgcctgtaatcccagcactttgggaggccaaggcgggcagatcactggaagtcaggagttcgagaccagcctggccaacatggtgaaaccgcgtcgctaccaaaaatataaaaaattagccgagtgtggttgtgcacgcccgtaatcccagctacttgggagactgaggcaggataatcgcttgaacccgagggggcggaggtttcagtgacctgagatcatgccattgcactccagcctgggcgacaagagcgaaactcagtctcaaaaacaaacaacaattacttaagcaatcattttaataagtatgtaatacattatacgtttatataacttgcttaataaataatagtagttattaatatccaatggcaagccgccgggaaacgacggagctgggatttgaggattggctccgcgaaccccacaacacccggggactccagcgaaccacacggggtggatccaacagccgcaggggcatcgtggtcctgcggagacgccgcccgcccggaggcggcgctgtgacccaggttggagagtcaggagcccagcgccgcgctgcggggcctgctgggacttgtagttcgcaggttcggggtgcgcaggcgcagtgccgagtttacctctgcgcgcgtcggggttggtggcggcggctgcggcgagttcctgaggggcgcctgcggggggcgtccgctccgagcgccgaggagccgagcggaggaggcgtcccagggacacgcaggggaggccggccggcctgcacggggcgctcccgcctcgggggccctgtctggcgcctcagcgcgcgccccgatggtcacctgcgcccacctgggccggcgcgcgcggctcccggcagctcagccgtaagtgccgccgcctcccgcgccgcgacctccgtgccgggcctgccggggctctggtggggctgggtctggcggggccgggtggccggggcatgaccctgtcgcgatagggtccccacgggagggtcgggagccggcagctcgcccagggccccaacgcccaggatggcacggtctgcccttgccctgtgaaaacgcccctgggtgagagacgcataagctttccgaggcccagcctgcaaggagagggagaagacgcattgactctaccctaaaggcagagaggggctgccacgctcgcactgcagtgaggccacatcagagggtctgagcgaggggcggtcctgccctccaggggacaccgggcgatgtctggggacgtctgtggttgtcataactgggggcagttcctggcatggagtaggtggaggccagggatgcaactcagcaccctgcccagcccagagaatgacccaggctccagtgtccacagcgccctgagggagagacctcacttatacgttagcaccgctgtcctggtgataagacagcaagggtccttttttttttttttttgagacggagtctggagtgcaatggcatgatctcggctcactgcaacctccgcctcccgggttcaagccattgtcctgcctcagcctcccaagtagctgggattacaggcgtatgccaccacgcccggctaatttttgcatttttagtagagacggggtttcaccatgttggccaggctggtctcgaactcccacctcaggtgatccacccgcctcagcctcccaaagtgctgggattacaggcgtgagccaccgcgcagctgcaagggtctattctgtttatacccaccacccatgttgaggaatgagggaggcagctgacctttctgctgctctagcaaccccaacctccctgaactctcccctacccaaacaggttggtttctttttcttcttcttttttttttcttgagacagtctcgccctattgcccaggctggagtgcagttgcacgatctcggctcactgcatccacctcgtgggttcaagtgattctcctgcctcagcctcccaagtagctgggattacaggtgcacgccaccccgcctggctaatttttatatttttagtagatacagagtttctccatgttggccagccaggctggtatcgaactcctgacctcaggtgatccacctacctcggcctcccaaagtgaccactgcgcccggcgcctttggttcttacatgagcctcctggagctgctgtgacaatgcaccacaaaccagggggcagggggaggcttgaaatttattctctcacaagtctggaggccagaagcccaacatgaagatgtggtggggccgtggtgcttctgaaggctctggcgggaggatcttctctgtctcttccagcttctgggggtggcctgccatagttggtgtcccttggcttggggccacatcactccaagctctgcctgcatcatcatgtggccttcttccctgtgtctctttctccttttttgtttttatttttattttttgagatggggtctcggtctgtcacctggctggagtgcagtggcacgatctcggctcactgcaatctctaccccacaggatcaagcaattctgcctcagcctctcgagtagctgggattacaggtgcacgccaccacacccagctaatttttgtatttttagtagagacgggggttttgccatgttggccaggctggtctcgaactcctgacctcgtggtctgcccgccttggcctttcaaaatgctgggattacagacgtgagtcacctagtccagctgtctctttctcttataaggacaatactcatgaccccagtagctggaagaggcggaaggatttttcctgagagcttttgtttcttcttttccttatcttttctttttgagatagagtcttgctccattgcccaggctggagtgcagtggcacagtcttggctcactgtaacccctgtctcccaggttcaaataattatcgtgcctcagcctcctgagtagctgggtttacagggatgtgccaccacacctggctattttttttgtatttttagtagacgaggtttcaccatgttggccaggctggtcttgaacccctgggctcaagtgatcctcgcgcctcagcctcccaaagtgctgggattacaagtatgagccaccatacccgagcttttccctagagccttcagagggagtacagccctgcccacaccttgatctcagacttccagaactgggaaaggatatattcctgttattttaagcccccgggttactggcaccttgtgaaaacagcctcaggaaatgcatggagcgcttcacttcctaatggagcctgggtgttttgtaaacttgtttgcttccaagggcctcaggaccttcatccataaaatggggcctttaagacccctggccatggatgtgtgtggcgtctcacacctttaatcccagaatttagggaggctgaggaaggtggatcccttgagcccaggagctatagacctgggacaacatagcaaggccccgtctctacagaaaatacaaaaaattagccggacatggtggtgcctgtagttccagccacaggctgaggtaggaggatagcttgagcccaggaggttgaagctgccatgagatgagctatgattgcaccactgcactgcagcctgggcaacggagggagaccctatctcttaaaaaacacaaaccctggcttcagtcctgggttctggcttcagtttacctccctctgtgtatggggggccccttcaagcaaatggaggttctccaggccaagggctctgggatctggggactggcctggatctggtattcgcagcgcctttttcctccccacagctctgcctgcccaggaacctgcttttcccaagaggagagaatggctgctgggtacctgccccgctggtcccaggtgagatgtcctcattctcccaaagggcacccagtatatccagagggaacaatcccaccagaaactcagtcctcgatagaggagaccccttgctatgtgaaagttcaggagaattccccaggagtggtgtgtgggatgaggtactcctgctgctcccaggtgtaaagagtgaccctcagtattgggactgagcacagcctctccctaggagacagtattacgggatccctggggtgtcagtttttctggctggaaacctctgtggctgtggtacctttgcccaagttcttgtcctgcatccaagaagaatgaggtatacagacaagtgaagggtgaagaagagttgtatttactgttagagcagctcagaggattgagcagctcctccctgttggcaggttgtctggtcgagtgttcagctctcagcagagaggaggcctaggagagggtggctcctctccacaggcaagtcattcggacgtctctgcaggtctctgaagctctcagcagggacggtagctcctctctgaagctctcagcagggatggtagctcttctctgccggcagatcatctctgcagccttcagtggagagggtactcctctctgcagctggtcgtccggtcccatcctgtcatctgtctgccttctttgtcctctggccgtcctctgccctgctaagcctgagcccagggcttttacggacctcagaggggaggaagtgtgtgccgactggttcatgggcggccatgggagggtcgaaagaggcaccatgagtccccactctggtctgtaggactggcagcctggcccccagtcttcaggccctccctggcctgaaggtggggccttactggggacccacccccttctgcccaggaattaatctgcctcctgctgccattcacggccctaggacttggcccaaaccccactctgagagaggccaggcagtgggagcagacacccctgaacctgcagggactagggagtccttcctgagactcctgagggtgcaggttgcagagatgcctgggtcctgcgcctgggaggacagccacggctgcacccaggagctcctgcctcgcccacttggaggaggcagggctctcacttgtctccagctcctgcctgcttcctggagtgcgaggcccaggtctgcagctgcgggtctggcagcttcagctgcacccaggagggcagatcctgcctcttctcagttcccccaagagcacagggaggctcgaatccacagctacaggaggacggggctcccactagctccatggagtgtgcagccccggtggcacctccctgctgctgctgacatgatggcatcagccactgccatcaacaggtgggatccagcaccttcccctggagagcaggcagtgctgcccaggaaggcatcctcctctttacctgaaagaatatttctgtaactgtgataaaacacacatgaaatacatatgaactttaccatcttagccgttgataaaacacacatgaaatacatatgaactttaccgtcttagctgttgataaaacacacatgaaatacatatgaactttaccatcttagccgttgatgaaacacatgaaatacatatgaactttaccgtcttagccgttttcaagtgcacagctcaatggcattaagttggacaaccatcaccaccctcctctctagaacttcctcctcttcccaaactgaagctctgtccccatgagacactcattccctgtccccctccccagcccctggtaccccccatcctactttctgtctctctgaatctgacaactctagggacctcctaggagtggaaccacacaggctttgtccttctgtgtctggcttctctcactgagcataacgtgattgcagttgtttttttttttttttttttttttttttgagacaaggtcttgctctgttgcacaggttggagtgcagtggcgcgatcttggctcactgcaacctctgccgcccaagctcaagctattcttgtgtctcagcctcccaagtagttgggattatgggcatgtgccaccatacccagccaatttttgtattattagtagagacggggtttcaccatgttggcccaggctggctgtgaactcctgggttcaggtgatccacccaccttggcctcccaaagtgctgggattacaggtgtgagccaccacgtccgccctctgcagttttatttaagacagagtttcgctctgttgcccaagctgaagtgcagtggcacaatctcagctcacgctgagatcccacctcccgggttcaagcgattctcctgcctcagcctcccaagtagctgagattacggcactcgccaccatgcctggctaatttttgtatttttagtagagacagggtttcaccatgttggccaggctggacttgaactcctggcctcaaaggccaaagtgctgggattataggcacatcctggagtgggatttttaaaatattttaaaaattttttgtagaaactgggtgtcactgtgttgctcagtctggtcttgaactcctgggctcaaacagagtcttcccagcttggcttcccaaagggctgggattaccagtgtgagcaaagtcggaagagtttgttttttttttccaggatgcaactgaagagggagaggtgaaggcataagacaggggtggactgaagcgagtccatacagggcccttaaggctgggattgaaagctcagggtgcctcctgtatgcctatggttcaggtgctagaagtggttctacatcttttctttctttctttctttttttgagatggagtttcactcttgttgcccaggctggagtgcagtggcgtgatcttggttcactgcaacctctgcctcccaggttcaagcaatgctcctgcctcagcctcccgagtagctgcaattacaggcacccgtcaccacgcttgactaattttgtatttttggtagagacggggtttctccatattggtcaggctggtctcgaactcccaacctcaggtgatccgcctgcctcggcctcccaaagtgctgggattacaggtgtgagccaccgtgcccagccagtaactttttttttttttttttgaaatggagtcttgctttgtcacccaggctggattgccgtggcacaatctccgctcactgcaacctctgcctcccggttcaagcgattctcctgcctcagcctcctgagtagctgggactacaggtacgtgccaccacgattggctgatttttgtatttgtagtagagatggggtttcactatgttggccaggctggtcttgaactcctgaccttgtgattcacctgcctcagcctcccaaagtgctaggattacaggcatgcgtcacagtgcccagccaacttttacatcttacagcagataccagcttacgtgctgttttataccatggattacctggatagccattcaggccctaaacactcatcagccccttcatatgttgaaacaacaaagcttttgccatatttcagtgggtcaaggttgttgtagcagattcctctttttttttttttttgagatggagtctcgctctgtcgcccaggctggagtgcagtggcgtgatctcggctcactgcaaactccacctcctgggttcatgccattctcatgcctcagcctcccgagtagctaggactacaggcgcccgccatcatgcccggctaatttttttgtatttttagtagagacggggtttcactgcgttcgccaggatggtctcgatctcctgacgtcgtgatccacccgcctcggcctctcaaagtgctgggattacaggtgtgagccactgcgactggctgcagattcctcttcttacattgtccatgccttgtaatgtgtaactctgagtcatggaagcaaagagaactaatctctaataactgtgagttttgaggaaggtcctgttccatcctgctttttgttgggtattgcttctcagtcttctgactatggcaatagcaaatgctgtgactgatattaactagttagtcctcacgacaacacactttggataaaattcttctttccattgaacagatgaggaggctgtgtcctggataggtcagcaatatacctgcagtcccataacttgcaagtggcatatccatgacatccattcattttcagaatcagcagggggagattctcacatgggaatgtcaggctcagagatccagaggttagaatcaccagttcaataagaaatgggcaaaatgtttcatccagacctgtgtgctggtcgtccttgttgtgttgatggtgggcctagggtctgtatgtccctctgattttaagccaaggacaagcacccacaaggcagctagtagaaactgacttatggactttgcaccttgacctttctcaacttccctggtgccaccaacctcacccctcctcccatgaacgtgggtggcgatggacccatcttgagcagaactgctgtgatattctaggaattagtaacctttgaggacgtgtccatggacttctcccaggaggagtgggagttgctggagcctgctcagaagaacctgtacagagaggtgatgctggagaactacaggaacgtggtctccctgggtaaggcaagcatcactaattcctgtgttcattgattcacatttatctggtgtattagtctgttctcacactgctaataaagaaatacccaagactgggtaatttgtaaaggaaagggggtttaatggactcagttccacatggccggggagggctcacaatcatggtggaaggcgaatgaggaacaaagtcacatcttacgtggcggtaggcaagagagcttgtgcaggggaactcccatttgtaaaaccgtcagatctcgtgagacttattcattaccacgagaacagtatggggaaaaccacctccgccatgattcagttatctccccctggctccacccttgacgtcgggattattacaattcaaggtgagatttggatggcaacacagccaaaccatgtcatctagcatctactatgtgtctggcaccatgctgggaatgggggattcattggtaagtaagacagacatgggtcctggttttgtggctttcgtggtctggtttctctgagaacagatgaccttacttgttcagtacgtgatagctggagctgcagtgcaattgcatgtctcagctcaggcatagataacttctctgattccccttgggaacaaagtcagagtgtcttagtccgtttcacactgctataaagagtaccacctaggctgggtgtggtggctcatgcctgttatccaagcacttagggatcacaagggtgatcacctgaggtcaggagttcaagaccagcctggccactgtggtgaaaccctgtctctactaaaaatggcgggcacctgtaatcccagctactcaggaggctgaggcaggagacttgcttgaacacgggaggcagaggttgcagggttgcagtgagccaagattgcaccactgcactccagcctgggtgacagagcaagactccgtctcaagaaaaaaaaaaaaaaagcaagaaaagaggtttaatggagtcacagttccacatggctcgggaggcctcaggacacttacaatcacggcagaaggggaagcaggcaccttcttcaaaaggcagcaagagagggaagagagcaggggaaaccttataaaaccatcagatctcatgagaactcactatcacgagaacagcatgggggaactgcccccatgatctcatcacctcccatcaggtacctcccttgacacgtggggattacgattggagattacaattcgaggtgagatttgggtcgggagacagctcaaccatatcacagagcatttgtactctttctgccaaggtaaagagccatcattaaaaaaaaaaatgtttttactgtgataaaaaatgtaggctgggcgtggtggttcatgtctgtaatcccagcacttcaggaggccaaggtgggtggatcacttgaggccaggagtttgagaccagcctgaccaatgtggcaaaaccccatctctactaaaaatacaaaaattagctgggcatggtgatagacgtctgtaatcccagctacttgggaggtcgaggcatgagaatcgcttgaacctgagaggcagaggttgcagtgagccaagatcgtaccactggactccagcctgggcgacagagcgagactctgtctcaaaaaatatatatacagcagtggctcacgcctgtaatcccagcactctgggaggccaaggcggggtagatcacctgagagaccagcttgaccaacatggagaaaccttgtctctactaaaaatacaaaattagccaggcgtggtggcgcatgcctgtaatcccagctactcaggaggctgaggcaggagaatcgcttgaacccaggaggtggaggttgcggtaagctgagatcgtgccactggactccagcctgggcaacaagagcaaaactccctgtcaaaaaaataaaaaaagtatatatacatatatatatgcacacacgtatctatctatatatctctatataaacataaaatgtgcctttttcaccccttttaagtgtgcagttcagtggcactaaatgcattcagcatgtactacagccaccacaactgtccatttccagaacttttatcctcaaccaaaactctgtacccgttaaattctccctccccagcccctccttcagccccttgtaaccatgagtcactctccatctctatggatttgcctaccctggacatttcttttcttttctttttttgagacggagtctcgctctgtcgcccaggctggagtgcagtggcgtgatcttggctcactgcaagctccgcctcctgggttcacgccattctcctgcctcagcctccggagtagctgggactacaggcgcccgccaccatgcccggctaattttttaataattttttgtatttttagtagagatgggatttcactgtgttagccaggatggtctcaatctcctgaccttgtgatctgcccacctcggcctcccagagtgctgggattacaggcaggagtcaccgtgcccggcagacatttcatataaatggaatcatataatatgtggccttttgtgtctggctgatttcactgggtgtgatgttttcagtgttcatttacattgtagcctgtgtcagtgctttgttcatagatgaagaagattccatcgtgtgtatacaacacgctgtgtccatccattcaccagttgatggacgcctgggtttccacctttccgctgttgtgaatcctgttgctgtcagcattggcaaacaagtatctgtttcagtcactgttttcagtgctttgggtcaatactaggagtagaattgctggatcatgcggtaattctatgtttagaatttagctttttcaggaactgccatactggcttttcttttgtttttttgttttgagacagagtctcactttgttgcccaggctggagtgcagtggcactctctcaggtcactgcaacctctgcctccgcagttcaagtgattctcatgcctcagcctcccaagtagctggaattacaagtgtgcaccaccacacctgtttttgtatttttttttttttatgagacggagtttcgctctcgttgcccaggctgaagtgcagtggtacaatctaggctcaccacaacctccacctcccaggttcaagcgattctcctgcctcagcctccccagtagctgggattacaggcatgcgccaccacacccggctactgtttttgtatttttaatagagatggatttttgccatgttggccagggtggtgttgaactcatgacctctagtgatccacctacttccgcttcccaaagtgctgggattacagacgtgagccactgtgcccagccccatactgggttttgtatcagcatgtatattttccattcccaccagcagtgcagactgttgcaatttctccacatccttggcaacacttactattttttattatggcctttctaatatgtgtgaagtggtatctcattgcggttttgatatgcattcccctaatgaccaatgacatcgagcatccattcctgtgtttattgaccatttgtgtatcgatttttgggggaaatgtaagatctgtaattttttttttttttttactctgtcgcccatgctggaatgcagtgctgcaatctcggctcactgcaagccctgcctcccgagttcatgtcattctcccgcctcagcctcccaagtagctgggactacaggcgcctgccaccacacccggctaattttttgtatttttagtagagacggggtttcaccgtgttagccaggatggtcttgatctcctgacctcatgatccacccgccctgccctcccaaagtgatgggattacaggtgtgagccactgcacccgccctttttttttttttttttttttgagacagagtctcactctcattgcccagcctggggtgcagtggtgtgatcacagctcactgcagccttgacctccccagggctcaagtgatcttcccacctcaatctcccaggtagctgggactataggcttagaccaccacacctggctagtttttttgtttgtttgtttttggtttttttttggtaggtccggggtcttgtcatgttgctcaggctggtctcaaactcctgtgttccagtgatcacctgcctctgggcctcccaaagtgttgggattacaggtgtgagccaccacgcccaaccagatctgtaattttttttttctttgagactgagtcttgctctgttgcccaggctggagtgcaatgccacgacctcggctcactgcaacctctgcctcctgggttcaagtgattctcccacctcagcctcctgagtaactggggttacaggcatgcaccaccacgcccagctaatttttgtatttttagtagagatggggttttaccatgttggccaggctggtctcaaactcctgacctcaggtgatccgcctgcctcggcctcccaaattgctgggattacaggagtgagccaccatgcctggcacagatctgtaattttttaactagaaaataaaatcattatcttgtgctacctctcaagtatactcttgtctttttcagaagccttgaagaaccaatgtactgatgtggggattaaagagggtccactttccccagcacaaacctcacaagtcactagtctttcctcatggacggggtatttactttttcaaccagtggcttcttcccacttggagcaaagagaagccctgtggatagaggaaaaaggaactcctcaagcctcctgttcaggtgagaatcaggcagatagaaaccattgggatggcagtggcatcgtgggaaacattggtcagagagctcttcacaaggccctgattctgtaaggagaatgccaagatccctttctcggacaccttcagttcattttctggcagctttctccttctctttactaccttacatgacctctctctggatacagagaaaagagtatctcattttcttgttttatttatttatcttaagacagggtctcactctgtggcccaggctggagtgcagtggcatggtcatatctcactgcatcctcaccttcctgggctcaagtgatcctcctgcctcagtctcctgagcagctgggactataggcacatgccatcactcccacctattttgtttttctcagagatggagtctcactgtgtttcccaagctggtcttgaattcttggactcaagtgatcctcctttctcagcctcccaaagtgttgggagtacaggcatcagccatgactcctggccccattttcttctattttttccccccattttcttcttgaagccattttgcctatgtttctagttgtctcttccctctttgctttcttgataattctttctctctgccagacatattctcccagcttaacagggtaatttctttctttttttttgaaacagtctcgctcttgttgcccaggctacagtgcagtggtgtgatctcggctcactgcaacctccacctcccaggttcaagcgattcttctgcctcagcctcttgagtacaggtgtgtgtgccaccacgcctagctaatttttgtatttttaatagagacagggtttcaccatgttgatcaggctcaaactcctgacctcaggtgatccacctgcctcggcctcccaaggtgctgggattacaggcgtgagccactgcacctggcctacagagtaatttctttctgcattgatatttccctgccttttcccatcactgtcaatcttccactgctgcatctcatcctcagtggccttccttgccacccatctctctttttcccatccttcccgcatgttcagagttgatatttgaacatcagtccgcacaggccttgtagatgtcagaaggacttctgtcccgctggttttcaagtagctgtttcttcttctaaaaaaatggtttccgcctcaatttatttcagattggatgactgtactaagaaaccaagactcaacttacaagaaggtggctttgcaggaggaaccagccagtggtataaatatgataaagcttatcagagaagatgggggatggaagcagttagaggacagccatgaagacccccaggggcttttgagccaaaaggcatcccttcacgtagtggccgttcctcaggagaaggctactgcatggcatggatttggggaaaatggtaatctgagcccagcccttgttttatcacagggaagctctaaagggaaccacttgtgtggcagcgagttagatattacaagcttggcatccgattcagtcttaaaccaccatcagctgggatatgcagatcggagaccttgtgaaagtaatgaatgtggaaatgccatccgccagaacagtcactttattcaacacggggggaagatgtttgtgtatttggaaaatgggcagtcattgaaccacggtatggccctgactatccacaacaaaatcaacacggcagagaaaccctttgagtgccaccagtgtgggaaggtgttcaaccggaggcattctttgagcgaacatcaaagaattcacacgggggagaaaccctacgagtgtcaggagtgtgggcgagcctttacgcacagctccaccctcacgcgccatctgagaactcatactggagagaagccctacgggtgcggtgagtgcgggaaagccttcaacaggatctcatcgctgactcagcatcagaggattcacaccggggaaaagccctataaatgtgaagactgtgggaaatccttctgccagagctcttacctgatcttgcacaagaggacacacaccggagagaagccctacgaatgcagtgaatgtggaaaggccttcagtgaccgttcctctctcaaccagcacgagcgaactcacacgggcgagaacccctatgaatgtaagcagtgtgggagagccttcagccagaggtcttcccttgtgaggcacgagagaactcacactggagagaaaccctacaggtgtcaggaatgtgggaaagccttcagccagagctcatcccttgtcacacatcagaaaactcacagcagccagaaaacctataaaatcattgactgtgggaaagcgttctaccagaacagacatcttattggatattagcaattgcacgctgctttgtaagccactttttagtactctgacacatacatgtggttatcttttgccctgttgtgatggataatttgaaaagaagtgggtttatgtcaccttctcaccttcttataagaaagctctgagaatgggcatttttgtattttgttgttgttgttgagatggagtctgccacccaggctggagtccagtggcgtgatcatacctcactgcagcttcaacttcctgggctcaagtaatcctcccaccccagcctcccaggtagctagtactataggtgtgcaccaccacgcccagcaaatttttaaatttattatagagtgggaggcagggtgcggtggctcatgcctataatcctaacactttaggaggccgaggcgggtggatcatgaggtcaggagatcgagaccatcctggctaacacagtgaaaccctgtctctactaaaaatacaaaaaagtagccgggcgtggtggtgggcgcctgtagtcccaactactcaggaggctgaggcaggagaatggtgtgaacccgggaggtggagcttgcagtgagccgagatcgcaccactgcactccagcctgggagacagagcgagactccgtctcaaaaaaaaaaaaaaaattatagagttggggtcttgctacattgccaagactggtcttgaactcctggggtcaagcatcctcctgtcttggcctcccaaagtgttgggattagaagcatgagccgctgtgcccagcctgacggggccttttagtgggaggagttgccattacactacgtccagtaagctccagactttcggaaaagattggtggacgggaatgctgtcatggatgggatcttgccaagaaccatcacgtgttaatttagttgcttaaacaaaaggtgttctgtttcttaactacttctgtgtctttactttttatttcattgttcattgtttttattttaatattcttttctgggtttatatgagacgagttttcactctgttgctgaggctgaagtgcagtggcgtgatcatagctccctgtagtcagccttcatctcctggactcaagcaatcctcccacctcagcctctccggtagctgggactacacatgtgcaccgctaccacacccagctaaattttttttttgtatttttgtagtgatgggctttcaccaggttgcccaggctggtctcaaactcctgagctcaagcaatccacccaccttggcctcccaaagtgctggtattacaggtgtgagccaccgtgctggtattacgggtgtgagccactgtgctgggattacgggcgtgagctgcccatgctgggattacgggtgtgagccaccgtgctggtattacgggtgtgagccaccgtgctgggattacgggcgtgagccactgtgctgggattacgggcgcgagccactgtgctgggattacaggtgtgagccaccctgctgggattatgggtgcgagccgccgtgctgggattacaggtgtgaaccactgctcctggcctttatttcagcattctgtttcagtgtttcacattggccacttagctagatccgtttgtcttctgcagtactgtgctgatccagagtatatgctaagacggaaagcgctttggaggtaaagtttaaaaaatacaagggcttcaaaatagtactagtaatttgatccattcacaaaaggacaaaggctggacagagacgtgaagaaatgaatcatttacgcaatgattggggtgttccaattatgtgtgattttgtgttttctgccgtttcattttgtattgccataatcattttgacaatgaatacaaatcaaatagcacccaaaattgtgaaggatacggaacctcattgatgagtcaggatagactgtgggtacctagatggtagagacatagtatagtagactttgggacatagagggtggaatgacctttggtggcctgggaaaagtcccgcctgtgagatgtccctagcaaaatcaagaccaggagtgctgatgtgcattatcgtcatgaacatgtattggatgcttactgtataccaagcaccagccaagtacttccatgtggttcttcatttagccctcacgaccccatgagataatcactattcacattccattttacagaagacaaaacggaaataatttgctcaaggtcacacaattagaaaggagtagaatctgggctgggcacagtggctcacacctgtgatcccagcactttgagaggctgaggtgggtggatcacttgaggtcaggagttcgagaccagcctggccaacatggtgaagccccatgtctaccaaaaaatacaaaaattagggaggccgagatgggcggatcacctgaggtcaggagttcgagaccagcctgaccaacatggagaaaccgcatctctactaaacatacaaaattagccggcatggtggtgcatgcccgtaatcccagctactcggaggctgaggcaggagaatcgcttgaacccgggaggtggaggttgctgtgagctgggacagtaccattacactccagctctgggcaacaagagtgaaactctgtctcaaaaaaaaaaaaaaaaaaaaatctgggcgtcgtggtgcacgcctctaggcccagctattcaggaggctgtggcatgagaatagctgatgtttcagtgagccgagatggtgccattgcactctagcctgggtgacagtgagactctgtctcaaaaaaaaaaaaaaaaagtagtggactctggatttgaccttgagcaccctgtacaaagccacacctcatttgccaggccaccaagcaggggaactgttttccaaatgttctcttggaaagctgggtgtagtggctcacaactgcaatcccagtattttgggagcctgaggtgggaggatcacttgagcccaggtgttcaaaaccagcctgggcaacattgaccctgtctctgcaaaaaatacaaacattagccaggcatggtggctcacgcctgtagtcccagctactctgggggctgaggtggaaggaccgcttgagcccaggaggctgaggctgcagtgagctatgagcataccaccgcactgcagcctgagtgacaaagcaagaccctgtctcaaaaaaattttacaaattttctcttaggactcatctaactttcctgtgaatgttccctttttccttgagctaatgagggaggttgcccgtcagatctcctttcacccaaatggaacatgttgcttttccttagagatccttgatccatggtcagtctagaccctattgggttgatgagtaagtttctttaggggctctgtgaacaactttgagaacaactttgtgtgctggtgcattgatgtgttttttggggaaagcatctgtaacttccagcatattcttgagaagggttgacttagaagtctcctgactgtactgttttcagtcttgttatctccctccagcaattatattttattttttgagatggagtctcactgtgttgcccaggcaggagtgcaatggtgagatttcggctcactgcaacctctgcctctgggttcaagcgattctcctgcctcagctcccaagcagctgggactacaggcatgcgccaccacgcccggctaattttttttgtatttttattagagatggggctttcaccatgttggccaggctggtctcaaactcctcacctcaggttgtccacccacctcagcctcccaaagtgctgggattagaggcgtgagccaccgagcccgggcacactatttttaactggaagctgctttcctatgtcagtcctctaaacattaatttttataaaagtgtgtaaaaccttcctaggaaagataaaaataaattttaaaaattgtttctaaatgaaatgtcaatatcagaatttgaacaaccacttaagctatggagttttctgaaatgaataaccattaactgtgtttggttttcagcccctgtctattaagtgtattcagtgttttcaggcctatcacaatcgtttttcctttttttaaaaaaaattgaaggctgggtgtggtggctcacacctgtaatccaagcactttgcaagtccgaggcaggtggatcacctgaggtcaagagtttgagaccagcctggccaacatggtgaaacctcatctctactaaaaaaataaaaattagtaggccaggcgtggtggctcacacctgtaatcccagcactttgggaggccgaggcgggtggatcacataaggttgggagttcgagaccagcccgaccaccacggagaaaccccgtctctactaaaaatacaaaattagccaggcatgatggcaggtgcctgtagtcccagctactcgggaagctgaaccaggagaatcgcttgaacctgggaggcagaggttgcagtgagccgagatctcgccattgcactccagcctgggcaacaagagcgaaactgcgtctcaaaaaaacaaaaaacaaaaaaattagctgggtgtggcggggcaggtctgtagtctcacctactcggaaggctgaggtacgataatcacttgaacccgggaggtggagtttacagtgagtcgggatcctgccattgcactccagcctgggtgacagagcaagactgaaaaaaccaaaaatttaaaaaaaaaacacttccctcctaaggttcaatccaattcatttaaacttttgcgtgtttttcttatatcagttaaaatagggattcaatatccttagaaatatagccttttctgttttaaatataacatctaaaaattgtagtaaaatacaaataacaaatatttaccatgttcatcatttttaagtctaaagttcagtggcgttagatacgttcctgttgtgcaatattatagacttccttttttttttttttttttttttgagacggagtcttgctgtgtcccccaggctggagtgcagtggaatgatcttgactcactgcaacctctgcctccctgggttcaagcgattctttttgtttttgttgttgttgtttgtttgtttgtttgtttttgagacggagtctcgctttgtcacccaggctggagtggtggagtgcagtggcgcgatctcggctcactgcaacctctgcctcccgggttcacgccattctcccgcctcagcctcccgagtagctgggactacaggcacccgccaccaggcctggctaatttttttgtattttttagtagagacggggtttcaccgtgttagccaggatggtctcgatctcctgacctcgtgatccgcccgcctcggcctcccaaagtgctgggattacaggcgtgagccaccgtgcccggcctcaagcgattctcttgcctcagcctccctagctgggattacaggtgcgcgccaccacgcccggctaattttgtatttttagtagagacagggttttgccatgttgggcaggctggtcttgaactcctgacctcaggtgatccgcccgcctcggcctcccaaagtgctgggattacaggcgtgagccacagcgcccggccagcttttcaatcttccaaattttggggggatgtacttaaaaaaatgatctgaaaacattttccttagagtttaaaatatgaacttgagagtttttttgttttttaatatggagtctcactctgtcgcccaggctagactgcagtggggcgatctcgggtcactacaacctccacctctcgggttcaagcaattctcctgccccagcatccccagtagctgagattacaggcgcccggcaccacgccgggctgatttctgtatttttagtagagaaagggtttcaccatattggccacgatggtctcaaactcctgaactcagatgatccgtccacctcggtctcccaaagtgctgggattacaggcgtgagccactgcgcccagccaaatgtgagggttttaatgaacatctcatatcttctggttgatttgagcaaagctcctgccccctgccaggctttgggttcggcctcccccagaccgggtctccggattcgcagccccctgggcggggtctccatgtcgcccgcagcgcgatgacgtcacgtctgcgggtcccgcccccacgtaggtctcggcccttcggacccggcgcccagcccccgttcgccctgccaggcccgggccgcccgcttgcatccacctcctgtccggacaaggggtcgcctcgtgaggaaactagtctggagttcccacgcccgtcccggaggaggacgcgggcggggcgcccgaactgcggggagagggcgattccgccccgggctgaaaccagttcgcccagaagccagtgtccccgcagggcgggacagccacgcgtgttcgcaacgctcccgtcactcaccggcagggggtgggccctagggaactacccagtcaggacgggcgggggcggggccgagacaagtatccaatgagggacgcccaatcggaatccggggaactgcccaatttacagcgccaggggacggactggggaattctccaatcagagtcgccgacgttggcagcactgtccaatcagaagcgcggcttcccgagctctgtctaatcaggcccctgggacgggacgcctctgtcctagccgtgagtgccccgcctgcccctagcggtccctggcgtcccggttcctgtcgcgctcacctgcgccggtagcgaagaaatcgccccgggacatggtgagtgtggcgcaggagaggatcccggtgcggggcagcaggaaccggcgaccgcccgagaccgcggcttggggggagctgagggacgcggggggcggccccggcgagggcggcgcaggacgggagcctgggccccgggggtcccgcccggccccgcctcccgcgctgaggtcgcggctagggcgctccgagctccgggtccccgcccgcctctggccccaaggctgcagagcggggagcggcgcccggagcccgactccgtccccgtcgtcccggggtccccgcgtccctgcgctcccgaccccccacgccccgcccggggccgcgacgcctcggagcgtttcgctgcggcttcgggacccccgggccgcgggaggcagagtcgcccgagaccccgaggtgcggtccaggctcccccgggacccgccctggggccgacgccgcggtgcctcctggggtgcgggtccctggtcggtgccgcctccgctcgcgctcccgcggctcagctccttggaggccccgcgcctccggccgcggtctctgggggaccctgggttcctcccgggacagcccgggagcggtggggcctcggcgggggcggagacgcccccacctgcaaaggcagcccctggggcgtgcgaggtttcctcccctgagtcccggttttccttcttgaggacttcttgtcccctctgaccccaagatgcctggggtaggtaaggggaaaaaaaacaagggttcctggtccctgggctctcacacacaaggaagaaaagtaactgaaaagactagagaaacaagggagagcgaggaccccaaaagcaaacgcacgcagacccacagcggggacgcccgggaggctggtgcattagtgtcctcggactgctgtagcaactgactgcaaacgagggggctaaaaccacggaaatatattctttcacggttccctagaaagtgtggatttgaagacgtttctcagttctgttttgagtactagcaatgggattccttgctgaggcaacacctgagttgggggtgggagggcgtccgtcgtggtagcctggccagacttgacccctccctgggtttgtcactgtgaaaagattttccttttttcgagtcagcagtttttaggaagtgaaacgtacatttaattagtagaagttggaagataaaatatttccaggccgggcgcggtggctcaagcctgtcatcccagcactgtgacaggccgaggggagcagattacttgaggtcaggagttggggaccagcctggccaacatggagaaaccccgtctctgctagaaatacaaaaattagctgggcgtggtggcgggtgcctgtagtcccagctactcgggaggctgaggcgggaaaatcacttgaacgcagaaggcggaggttgcggtgagctgagaacgcgccattgcactccagcctgggtgacagagcgagactccgtctcaaaaaaaaaaaaaaacttccaacggggtgaatttcaggaaaaaaattaaaatctgtgtcttacattccatttgttaaacattccctggagtgtgtgtcgtttctcagatctgttattttctgttttcttttattactattatttttttgggagctctgttgcccatgctggagtgcactggtgcgatcacagctcactgcagcctccacctcctgggctcaagcaatcttcctgcctcagccttctgaacacagggactccaggtgtgtgccgccatgcctaagcttttgtatttttttgtttctagggatggggtctcattctgttacccaggctggtctcgaactcctgagctcaggtgattctccctcctcgaccagccttgttcttttcttttgaatgacaataaataggattccagggcctaaacttcaaaatgttactggggagaagagtctcagagaaacagagaaaatctcctttccaccatacgtgcagaaaaatgaatacattgccacgaaacatgttgcagataaattatacaaatttaccaaaatatgttattctccttgacatggtagagaatttttgacggtggatgattctgttctgcttccaatactgcagtacccttaccttaattctataatacattttttgttgttcctgaaataggtagaatacaagatatttttcttgtttagatgacaatttgtcccagctccttatattaaagtgtttatcctctgcaatgccggccctggcactgatcagatttccccgaacacaggggctgcctcagggctgtgtccctttactttgtttttttgttttgttttgttttgagacagggtctcgctctattgcccaggctagaatgcagtggtgctgtctcggctcattgcaatctctgcctactgggttcaagtgattctcctgcctcagcctctaaagtagctgggactgtaggcacctgctaccatgcctgcctaatctatctttcttttcttttcttttttttctttctccctctttcctttctctctctctcttttcttttttttttttttttttttaaagagggagtttcacccttttcgcccaggctggagtgcagtggcaggaacttggctcactgcaatctctgcctcctgtgttcaagcaattctcctgcctcagcctcctgagtagctgggattacaggcatccgccaccacgcccagctaatttttgtatttttagtagaaatgggctttcaccacattggccaggctggtctcgaactcctgacctcagttgatctgcccgcctcagcctcccaaagtgctgggattacaggcgggagccactgcacctggccatttttatgtatttctagcagatacagggttttgccatgttggccaggctggtctcgaactcctgacctcaggtggcccgcccgcctcagcctccccgagtgctggaattataggtgtgaaccaccatgcccccaaccagggtgttttaaaattggcggctggtcacagaggtcccctgtgcctggctgtgccaagatttcagacacccaggaggaaagcagatctttagggtaaacacattgttgcataaacagtttcagcacaataagcaactcctctattgggatgagaaccctccccaaatccaggctagcttatgccagccaagggccaactttgcaggcaggactttctaaggttaggggccctcaggcctttgggttggctcttcctgcgtccaccccctagcccactgcacaggtgtctctaccacagaattattatgggaggcccctatgaagtaggaggagaccacactgcagtaatgatttcacttgtgctgtttagggctcctggacttagccaggtaaggtaaattccattggctgcaatggaatcattatttttttaatttccatttttatttcagattcatgggcacatgtgcaggttacaagggaatattgcatgatgctgagatttgggcttccattgagcttgtcacccagatagtggacatggtagccatgaggaagggtgtcagccctttccccctctgtccctccatttggaatccccagcgtctattgtttccagttttatgtccatgtctacccaagatttacttcccacttataagtaagaacatgccatatttggttttctgtttctgcatgagtttgctgaggataatggcctccagctgcatccatgttgctgcaaaggacatgatttcgttcttttttatggctgtgtagtattccatggtatagatggaccacattttctttagtgcactgtctttggtcacctaggttgattccatgtctttgctattgtgaatgctgctgcagtgaacacacaagtgatgtgttttttggtagaatgatttcttttcctttgggtagatgcccagtagtgggattgctgggttgaatggtggttctgtttttagttctttgagaaatctccatactgcttttcatagaggttgtactaacttacattccctccaaccatgtgtaagcattccctttcacagccctgccaacatctgttattttttagctttttaataacagccattctgacgggtgtgagatggtatctcatcgtgctttttatttgcatttctctgatgattagtggtgttgagcattttttcatatgcttggaccacaaaggtcttagaaagccaggtggcttattaagtttctgtagtattctcttccttcccccgttactatttttttactggagagaggcaccaattcctgcacagcataactctggccagtaagtcaaacttagacctgggtgtcttccagggacaaggcagtgccctgagtgccagggtaagtacaaaacaagtccaaccccctaggggacaggtagtcagtccccttggaagcacattgtttgcaatggtcgggacaccccaagcaggacttaacattggtcaggcagtcgggttagcagggctcccagtgtgacctcccactgtgggcctcctgtcctagggttctcagtgtagaccgaataattcagtttagtcctcagtttcagaggctctgcctgaggcatcattttcaagcagttttgcatgtctgtgataccagttcattgacctctccagtatggacgacacctggagatgtcctttgtgggaagttcaggaactggggccacttgctgctgtctcagggttgtcggatgtgatcagaggcttagcagccaacctgaattcagagcactcacagctgcatgcaacacttccttcaggaagaggggagcgcttcggtcacagctctgaatcagacagttccatccaaggtcaagccagtccttcactgtgggcaactgagtgagccacatggaccagccagcacccctgatgtttttcgtagttcagggccttacccgggagtgtctaactctgcagtgtttcctgaattagagtcctgttcattgagcctagccctgctgtcaggtcagcatagtgaaggctgagttagcagtggacatagtgaggatgaattagcagtgggcagtgtcaggttttagcttacagtcaagtccacgccgttgggatctgagttcagaattccataaaacaccgaaggctttgcttctgcagcagtaaagctaggtattgccgggttggacagctgtgttccaagatcaagttgcaagcaagagtttcctaagcgcttttggtctcgtgaatcttagagtccaaattgacagttaaaaatatgcacatgtggtttgaaaaccatcaactcttgaggttgtcagaaataggttttcataagagcgcattaacaaactagaaactactacttcacattccaaaagtgtatctccacttagagattgcctctcttttcatttgtttcccttttccctgaacctccaataggaaaaatgatagtaaaaaatcagttgtggagacctaatcttaatacttagagtttaaattccaatccatacaccaggggcaaagagcaaagaagttgtgtctgtcacttaaaaaaacaaaacaaaaaactgattgagatgatccctgtagtgcttttaaagtgacaaatattttaccattttctctcatttttatcacacatgccgatgcggtagtattcctcgtctcttagagcttctggtagccccaagtgttcctttgcttgtggcaccataattcagtctctccctccatcttccacgtggccaccttccgtgtgtgtttctgtcttcatgtgacattttcctcttataaagacaccagtcagcggaggggggagggatagcatttggagatatacctaatgttaaataacgagttactgggtacagcacaccaacatggcacatgtatgcgtatgtaactaacctgcacattgtgcacatgtaccctaaaacttaaagtataataaaatggttaagatggtaaattgtatgctatatgtatttaccacagttaaaaaattggagaaaaaatccttggaatatagtagatgcaggttcaaatcctgccttcagcatttattagctgaactgatgctaataaagttacttaatctgaaaaaaatttaaaaaaaataaaaaataaagacactagtcatattggagtagggcccattggattagatgatgtcattttacttgattacatctgcaaggatcctatttacaaataaggttatagtcacaggtaccaggaattaggacacggacatatctttctgggggaccacgtcacaagaaaccgctggcagttcagcatttacagggatagcattatgctagcagggaagaccatggctggtcaggaggtaaaccaaggggaagcagggaacactccagccttttttttaaccagcaacaggttttaaaaaagcacggagtgtcccctgcctccccagggtttacctaaagttgtgctccagccttggtaattaactttcttttccctcccaatgcaacacaaacttttaccattttcctcacccaaagcttacctttcagaacatgggggccctttctcctacctggagaagaaaacaaaaaccaaacgctgctctttgttttcttttctttttttttttttgagctggagtctggctctgtcgcccaggctggagtgcagtggcgccatctctgctcactacaagctccgcctcccgggttcacgccattctcctgcctcagcctcccgagtagttgggactacaggcgcccaccaccacgcccggctaatttttttgtatttttagtagagtcggggtttcaccgtgttagccaggatggtctcaatctcctgacctcgtgatccacctgccttggcctcccaaagtgctgggattacaggcgtgagccaccgcacccagccacccaggattttttttagatgaagtcttactgtgtttctcaggctgtagtgcagtggcacgatcttggctcactgcaacctccacctcccgggttcaagctattctcgtgcctcagcctcccaaatagctgggattacaggcacgtgccaccacgcccggctaattttgtatttttagtagagatggggtttcaccatgttggccaggctggtctcaaactcctgacctcaagtgatccgcctgcctcagcctcccaaagtgctggggtgacaggtgggagccattgcatctggccagtacccaggatttttattgctggctgatcacataagcatcccctgcctggtatgtacacagattccatttccagaaggaaagcagctgttcagcattaacagtggtatttgcaccatgagtaatctgaattagggtgggggtgaaccttcccaaaacccaagttcccagacaccagctaagggcaacattgccagaaagccgttctaaggatagagtctaaggcccgcaatgttaacttctttcggcatatgggaactttattattaaaaaacactgcaaatacactgcactatgagcaattaaggctaacccagggagctcatattgtcccctgtgccagtaggagggtcctgtagatactctgcagctctgtgaataggactgttctagcatcagaattgctgcgtgacagtattttgtctgtctcctgctcatagacggaaaggagttgatctttctcagcaggtttgagggaaccgtgcatctcgggggttccatgcacctgtgcccaatatgcaatatggaaataatgagaaattgagagtgcagcctctagagtggtatgtggggaatcacttcctcctggaatttgagacacagaattttctaggaaggcactattttgtctatgtcttttataaccattgaaaattcgtagtcaaatggtttggacttcagttaactcctttgcaaagtgggactcttaactttatccttaaggttagcaataatactttttttttttttttttctgagactgagtcctgccctatcacccaggctggagtgcagtggcatgatcttgatgcattgcaacctctgcctcccgggttcaagcaattttcgtgcctcagcctcccaagtagctgggactacaggcgtgcaccaccatgcccggctaatttttttttttttttcagtagagatgaggtttcaccatgttggccaggctggttttgaactcctgacctcaaatgatctgcctgccgcggcctcccaaagtgctggggttacaggcatgagccaccacacttggcccaagaatactttctttcggctctggtgaaaagagctgttttggcattgtgtgcacctcgctctgtgtatacttagtgagtgtgcctgtgtgtacgagagagagccagcgtgtgagagagagagaacccagaattaattgttgggcttccgtcactgaggctcgaagtatagggaatgtgtggaggtctacgttctcgtgtctttttcctctttcctaaggtctaatttctcaataacttctagtttccaagttaaaatcaatacttctcaaaagaatgttttcattcagccagttggaccaggagttctttaagacgctatggctacctggcccttatgaaggaaatagaagggaatgttcccaatccttcagtgtttttatcccataaaacttcagttttgaccctgtgctttgtgtagtgccgaatgatggtgtgtgcagcaggggaggagctaaaacggtttgtgtgacaaggcactgatggtcttaaaatacaagtatttgtttcacttatatagcatttgtttgatatctccaatgtggtctgaatccttttgatagagaataatgtcttcagttggtcccagtaaaagtatagagagaaattcagtgtgttaatggtcctgtgaaatctatgaggaagtgagtgtagacaggaaggaagaggtgtgacaactgagtcacagggtagatgtcagggaatcacagaatcttgtttgaactacatacgaattgagtacaatgctcctgggctctcggtctcaaccatcctcccataaatatgttgaattgttttaggactcagtggtctttgaggatgtggctgtggacttcaccctggaggagtgggctttgctggattctgctcagagggacctctacagagatgtgatgctggagacctttcagaacctggcctcagtaggtaaggatgacatcattccttccttcacgtagttattgagagaacaagtatttcttacacatcagacctgttccaaggcttggaatgtggaaagggaataaattggtaaataagacagacatagtcacagctgtcatagagctagaatgtaatgtttttccatgagaatgagaatctgtatttcagctttttatttttgtagagaaagctcccttcatgtcgtcattgtggatatagctttgataggcctagtgaaatttgtttgtgcaagccagtgaaaatttgatttttttttttttttttgagatggagtctcactctgtcgcccaggctggagtgcagtggtgtgatctcgactcactgcaacctctgcctcccgagttcaagcaattatctgcctcaggcgcccaagtagctgggattacaggcgagcgccaccatccctggccaatttttgtatttttagtagagacggggtttcaccatgtcagccaggctgctcttgaactcctgacgttgtgatccacccgcctcagcctcccaaagtgctgggattacaggcatgagccaccgcgcctggccgtgaatttttttttttaataatttttctatgcttactaatactgtgttgattgagttgcttacctttttgaccattttgtgtttaatgaagtcctgagatagctaaactcctcagtgtcgttttccgctaacaagtgccttcttatatgatttgtttactttttggtttcagatgatgaaactcaatttaaggccagtgggtcagtttctcagcaggatatttatggagagaaaatacccaaggaatctaaaatagccacgttcaccagaaatgtttcctgggcctctgttttaggaaaaatttgggacagtcttagcatcgaagatcaaaccacaaaccaggggagaaatctcaggtgagttgcactcacaagagaacatagtatttcaggagagaatcttagtctgtcattaaactttaaaaaagcaagcaaacagaaaactcatccaagcctagctccaatttgtttaatccacagaatttttacaaaaaaatatttctttaaatgtgacatagacagtgagtgacattagaaacataattcagatggaaaccattatcaagaaaccctaggccaggtacggtggctcacacctgtaatcctggcactttggaaggctgaagtgggcagatcacttgaggacaggagttcgagaccagcctggccaacatggtgaaaccctgtctctactaaaaatacaaacattagcagggcatggtgccgcaggcctgtaatcccagctactcgggaggctgaggcagaattgcatgaacccaggaggcagaggttgcagtgagctaagactgcaccactgcactccagcctgggtaacagagtaagactctgtctcaaaaaaaaaaaaagaaagaaagagaaagaaaccctatacataagaaacactgttttaataatggcagtggtcaaaccatcttccagggcattcagtttatttcattttcagacagttcccatggggtgaaaaacctatgctttcactgaaaatggttaagatgcagtcctaatcctaataaatactaacaaatcattattaatcaaaccaataacatgcttctcatttttagtagaaatcatgggttggagagactctgtgaaagtaatgatcaatgtggagaagccctcagccagattccacatcttaatctgtacaagaaaattccacctggagtaaaacagtatgaatacaacacgtacggaaaagtcttcatgcatcgccgcacatccctcaagagtcccatcacagttcacactggacacaaaccatatcagtgccaggaatgtgggcaggcctacagttgtcgttcacacctaagaatgcatgtgagaacccacaatggagagagaccctatgtgtgtaaattatgtgggaaaacctttcctcgtacttcctccctcaatcggcatgtaaggattcacactgctgagaaaacctacgaatgtaagcaatgtgggaaagcctttattgacttctcaagtcttactagtcatctcagaagtcacaccggagagaagccatataagtgtaaggaatgtgggaaagctttcagttattcctcaacgtttcgaagacacacaataacacacactggcgagaagccatataaatgtaaggaatgtgcggaagcctttagttattcctcaacttttcgaagacatatgatttcacacactggagagaagccacataaatgtaaagaatgtggggaggccttcagttattcttcggcttttcgaagacacatgataacacacactggagagaaaccctacgaatgcaaacaatgtgggaaaaccttcatttatctccagtcctttcgaagacatgaaaggattcacactggagagaaaccctacgaatgcaaacagtgtgggaagaccttcatttatccccagtcctttcgaagacatgaaaggactcatggtggagagaaaccctatgaatgcaaccagtgcgggaaagcattcagtcacccctcctcctttcgaggacacatgagggtgcacactggagagaaaccctatgagtgcaagcaatgtgggaaaactttcaattggcccatatctttacgaaaacatatgagaacacatactagagagaaaccctatgaatgtaagcagtgtgggaaagccttcagcttgtctgcttgctttcgagaacatgtgagaatgcaccctgaagacaaatcctatgaatgcaagctatgtgggaaagctttctattgccacatatccttacaaaaacatatgagaagacataccgcagagaaactctataaatgcaagcagtgtgggaaagctttcagttggcctgaacttttgcaacaacatgtgagaacgcacactgtagagaagccctatgaatgtaaggaatgtgggaaggtcttcaaatggccatcatctttaccaatacatatgagactgcacactggagagaaaccttatcaatgtaagcattgtgggaaagcattcaattgttcctcatccttaaggcgacatgtgagaatacacactacagaaaaacagtataagtgtaatgtaggacatcctcctgcaaatgaattcatgtgcagtgcttcagaaaagtcacaccaggagagagatctgatcaaagttgtaaatatggtgttgcctttatgagttccttatcctgaaagtggacactcaaggagtgtgtctgtagttcatttgcaaataaacatttagttgaaaaataattctccaaatactctcagctatcctacatgaatttgaacaggtagtttcttacgattcagtaaataaaactttcatcttagagtgttttggactcatggatgatttgaagtgtatttttaatatgcaagtaggttcaagttttatttaatttcttaaattgtaactgacttagtgtgacaggtattggatattacgtatctattatattttccaccttttttactgggagtatttttattgtttggccagaggagccttattccattttttaagaagtagttggcagaattttgtaattatgcaaagttgtttaaggagtatagcctcaaatgaattgtaatttttaatgtttgcccattgctgtttgtctttgcttgtgattgtgaattggacagtaggctttgacttgtgatgtgacggagaaatccagagttgcagatagttcttctgcattgttgtcagtgtgggtagtgttaggaacttcatttgctggaatgcatttcctttatggttccatgtccaaatttaccaatagcaataacttgaatgaaatttagaatgaagaagaagtaagtcatcgctgagcttttggggtcacattaaatggagatggacagatgcataggggctttgtgaacatcaaccttcagcttattttccagattcttattcctgccaatcaagagtaccatcaaaagaaacacttaagtgcttgatttccactgtgtcagaggtgtagtcttcctcagacatctccattaacttgatattagggatattcctgtgtggtcagtcacctagagtctggatttttctcaaaaccctgcatgacctcttgaccactgattcagactgtcttgtttggcagtctctgagcttctgattctcccgttctgtagatcttaacatatttgcatggggtctaatttatatagtgaacaccttgttatcttaatacttccagtggctctgtgatcctgattccaccacgaaagccacagtgttgcagtcaaagaagaaaaacaacacatgggactttgtaccctattgcatttttaagtgtgcctgccgagtcctatgtgagaacaaataccttcctcatatattagatttagggagatttctgttactcagaactaaatgcagtttcttgatataggttaaattattaggtttgattatgtatcattaaaaataatgtggattttgtttcaaggaaaaccttctgtagatatttcttagaaatatcctgtttagctgggcacagtagctcatgcctgtaatccctgcactttgggaggcttgaggtcaggagtttgagaccagcctggttaacatggtgaaaccctgtctctactaaaaacacaaaaattagccaggcatggtggtgagtacctgtaaccccagctacttgggaggctgagacaggagaagtgcttgaacctaggaggcggaggttgcagtgagccaagatcacaccactgcactccagcctgggagacggggaaagactccatcacacaagcaagaaaagaaaaaaaaatcctatttactgtgctttcaaattagttgtttagagactatattaatttcccagggctgccataacaaagtacaaaaactgggtgacataggaaaacaaactttttgtttctcagttctggacccagaaatccagaaacaaggcattggcaggaccatgctttttctgaagatgctagggaaggatctgtttcagaactcacctagcttctggtagttccttagcttgtggcagcataactctaattttcacatggcattctccctgtgtgtgtgtctctccatgtgacaatatttttatacatacacaccactcattgggttaggccccactctacttcagtatgattttaccttaactaattacattggcaacagctctcttttcgcatactgaggcaccgcgaattaagatttcaacgtaaaaattttaggagacccaattcaacccataacactaagaaatgttattttttgtttaccgagagaattacagatttcaaatcaactttgtaattttgataatttaagcatgttacattttgaatcagtattaccaagtatatacaaatacaggtattttttcatataaatgttatttttaattgctgtatacttaacatttgccattaaaatgattttttttttttgagacagagtctcgctctgtcacccaggctggagtgcagtggcacgaccttagctcactgcaaccttcatctcccaggttcagttgattctcctgcctcagcctcccgagtagttgggattacaggcatgcaccaccacacccagctaatttttttatttttggtagagatggggtttcaccatgttggccaggctggtcttgaactcctgacctcaggtgatctgcccaccttggcctcccaaagtgttgggattacaggcatgagccaccacacccggcctaaaatgatttcttatttgtggttaataacaattaaaaagcggaaataatggttttgtcaaggccctctacccagaaaccaccaggatcacactggtagtcaaagaaaatttgctgtgttgagttgaagtttgaacacatgatcaagaaagggctgtggcttgtatcagagggtgtttaaaaggatttactatcagatttggccttgtgttctgtgattttggtgagcgttcaaggaagccaggctttggtctggattggatgttctcaggtcatgaatataattctctgggaactcccaaagttctcatctacaaagcagaagttaattggagctgaaaactaatcagtaaagccacagcagccagtcatatgggggagaagaggggaatgtttgatggtttttgtggtttagaggtgagttccggaaaaaaagaagacatgtttgacatcctcaaacgagaaaatttttcatgtgttttataggccaaggaggcagaagcttttgttttaatgagccagaaagccccaaaagcctatttaagttttctcaggtatcatttcaacctctgaacttccagaattaactagggaagaggaaaaacatgtaacaccttagagttttattaaagagcaaacaatatccagtaatctccattactttccatgttaacataagttttcataacgctctatagatgaatgtgatttggcagtcacttgtatttcttaacacccacttacccatcattccctcttagatgaaaaaagttaagcacggggacaacagagtcttgtatattcatgtagctcatgatgatggaatcaagtttgaaggcttaacctgtgcttaacctatattgggcattgtcaagacttaaatttagaacactggaaagcaagtataattaattttacaaatagggcatcaaattttacaaagactcctaaggctatatggtattccttttataagacatggaaaaggcaaagataagggaaacgaacaaatcgctggttagaagtaggggatttgagtacatatgggcttaagagtgttctgtcatgattgtagtggtgaaaacaagcatttgcaaaaactcataaggctactcttaaaatagcaaattttgttgtatgtatattttaaagttaaacaataaaaatgctttcagtttattaaagaactcaagaccaggtgcagtggctcatgcctataatcccagcactttgggaagctgaggcgggaggattgcttgtggccaggaggttgaggctgcagtgaactatgatcatgcactgcactctacactgggcgacagagcaagaccctgtctcaaaaaaaaaggaatacaaaacattcctgaaacttgacatgtaagttcgcaataagacttttccctagctgggcgcggtgactcatgcctgtaatctcaacattttgggagactgaggcaagaggatcacttgaagtcaggagctagacaccagtctgggcaacatagcgagacctcaactctaccaaaaaattaaaaagtgagccaggcggggtggtgcacgtctgtggtcccagctacttggcaggctgaagcaggaggatcacttgaggccttgaggagccatgatcgtgccactgcactccagcttgggtgacagagcaagactgtctcaaaaaataaaaataaaaaaacaagacttcccccaccatcttggaattctctggaggaaatgtagggctggttgacaaggacttgtgcctcgtcagaccctgtttgaaacccagtctgaagttttgaaacacccacaagggccatacctgactttatctcacgcacataacaggagagaagaaggaggtcttccagaatctgtctttgagtttacaccaggttcttcccatctgatctttgggaatgctgtggttctgaaacataaaacggggaccctacacttcttcccaggaatatcctgcctgggagcatcctgatcctgtcttcagacaaggggcatccgcatcttgttttctagggcctttcctgaggccacttccagctccaaagttctcatctcaagctcagctctgtgtcttcatgctgggaaacgtctttatggatccccaaactcctcttgctgttgggaacacgtggcagccctgcgttgtgaggtgagagaagaggcagtggcagaacccatgccatggagacacgcccatcagccacagcagctcctgctactgcataaatccataggcacaatcacacgcctcacggtgtcaacatctcccatgacatcacaaagatgcccagctgggacccacctacagtgatggggtgatggggtttcacctataagcgggcaaacaggcactcctcctcactgtccagtcacctgacgtgctttttctgcgcactcaggtcgtgacaccccaggaggtgcctatcgcgccccaagctcctcacgtgcctcctccccacagtccaggacgcgtcttactaacgcctcaccagagcgcatgcgccctcctcaggagcagcctcaaagcgcgcagcctcagcccattggcctgcgggaagtggagttcccgaacagaagcccctcagtctccggaagccccgcccggcagactgttcccaggatgcaacacgggctcgcgtctaaaagagctgtgctttgttggggctatctgggagtttccgccttccatgaagtgcgcaggcgcacttaggcgaggcggggcgactctaggaagtggagacatcaagagtggtactggaagtggcggaagctctcctcttgccctcttcagcttccggtgtggtgggtcccggatatcgcgtggctgtggcaggtagacagcccgtgctccagaggccttcatcttgtgatggcagatgtacttgagtagacacgacagacggggaaggaccctgatggtccgagggaccttccacagcaagtagaaggcactgctgtgaatatgatggcgtcagaggtgactgcaaaaaaggacagggcagctgggcgaggaagagataccagtgatgtcctaactgagctccctgggtctggtagtgaggagctcagtcttagaatatgagccgtgtcaggggctacagcatcatcactcttgtcctgtcgcagactcaggctccctgttctcaggttcttatgtagacagtgagggctcagggaggctcccaccaccaccaccaccagcaccaccactccatcaaaacggctgaaggaccttcctttagggttcgggggatctcctccttccacaagggatggatgtgaagacaactcattctttgatgttcagatggttgtggccctctgatgagatgtgtgcacaccttgccaaatgcatatgtctgttgagcctggacattaagtatttcttgatgttcttctgtgtaacaggtgatgtcctaggtgctgcagtgaacagaagagacaaaatatccttgttcccttgaagctaatgtcgtaggggcccaaaacaaagcaaacaaacaaaaaaaaggaatgcaagtcaagtacactttgtatggacagtggtaattcctaagaaggaaaacaaagatggacttaaggggtgcagagggcctggactatgtgtgtctgtgggatagtctgttactacctctgggactctcatctcttgagtgtgcttgggtgtgtccaaccgtttttcctagtgacaaagtctgggtaattctgtggggacatatattggtgtatctgggaggtcccatgtgtctcagtggtggtccctgttttcaggaaagagtgtctgtgaatgtccatgtgtctcactgcacagctgtgatttttctgtgtctctgtgttttccagtctttgtgtgatgaaatataaaggcctagcaggctcagagttattaatgaattgtacttaagcgttgagaggcatatatttattgcactattaaattcttccaaaatatagttaaaaaaaaaagcttcacagttttttagtaagtttgagtgaatttttttttcagggagtggggaacagagtctccatccattgcccaggctagagtgccgtggtgcagtctcagctcactgcaacctctgcctcctgggttcaagcgattctcgtgtctcagcctcccaagtagctgggattacaggtgtgtggcaccatgcccagctaattttttgtatttttagtagagatggggtttcactatgttggccaggtgggtctcaaactcctgatctcaagtgatcttccacccacctcagcctcccaaagtgctgggattacaggcgtgagccactgcgcccagcctcaagttgattttttaaagtttggcattcattgtttatttaaaaaacaacaattgggcagggaccagaggctcacacctttaattccagcactttgaaatgtcgaggcaggtggattccttgagctcaggagttcaagaccaggctgggcaacttggagataccccatctctgcaaaacatgaaaattagccagatatggtgaggctcgcttgtagtcgcagctaatcaggaggctgaagctggaggatagcttggacccaggaggtcgaggctgctataagccatgattgtgccactgcactccagcctggaaataagagcaagaccctatctcaaacaaaccctatctcaaacaaacaaataaaaacagccatattttattttaaaatatgtatcaaatgaattattaacaggaagcctattttctaaatggtaatcctttaaacactaatttttatgaaagtggccagtgctttttgtaaatcataaaacatgagtgttttcttcaatttgatttgtaaataaataatatcagagtttgcacttcccttggttcttaaatagaatattttcagaaatgggagcatataaaatgcatcaggagtgttgaccgaatttcctagtgattgatggaggccagccaatcctcagttgcacctcagagcctgccattaaatttaaaatagaagatgagaaactaaacttctcagttgacagtggtccgactttctctgccagcttctcagaggactcatctctactgtcacttttcattcttttcagaaaagctgtcagagtctttaggcaacctgtttcatcacccatgtctcaggccacaccaatatcctcagttctgattaacactcattatagctttccagtttctgaagcctcaccggtaaactgtctaggtagtgatttgctacataaatttaatgccatcatgcaatgtaatgggaaaggtgtttttattcccctgacctgagaccaaacttcaaactttctattttccctaattgagacttgtcctctgaagaggatgcaacctcaagtgatgttccaactacttctaatgactgatgttccagttagactctgggcctcatatgcaaaggaagttgcattgctgcagagcgcagagactgtgcacgttgcctggaaaaggaataagccttttcttttttttttttttttttttttttttttttgagatggagtctcgctctgtcgcccaggctggagtgcagtggcgcgatctcggctcactgcaagctccaccttctgggttcacgccattctcctgcctcagcctcctgaatagctgggactacaggcgcccaccaccatgcctggctaattttttgtatttttagtagagatggggtttcaccgtgttagccaggatggtctcgatctcctgacctcttgatccgcccgccttggcctcccaaagtgctgggattacaggtgggagccaccgcgtccagcctaagccttttcaatcaatagctcaatgccctctcgtgtcaatatgcagaacaaggaactgaatctatactagactttattacagcacagtgtccattatctttactttctcccactataataccccagtcttgcccgtaaagatgagaagggaagtttgactttgatgagcaccaaagttaccaattttacaaaatctaatagccataattcttgtagttcctcaccaccctacagttcccactatttttaccctagttcctgtgtctgcagcctggtttgcatgaatggacctctgctcagctgtcttttccattcctttgcgtcctgattcacagttcctctttgcacttctgtttagaggaggacagtgggtatggcctgcacacctcaggaatattgctggtaccccatccatattttcccaagtccttaaggcctactcagactttgtaacatttatccaaggctctactcgtgttcagtatactgatgatgcctttgtagccaaactaagcaaggtggtcttatggatttcctcattctcctagagacactagctgaattaagccataaagtctcccaatctaaatttcagtgggtgtagatagctattacttaggatgcgaggtatctcagggcacccaaagctcacccagaacaccttgaatcaattttatccatcgctctccgcaaaataaaagcaggtatgggccgggtgaagtggctcacgcctgtaatcccagcactttgggaggccaaggtgggtggatcatgaggtcaagagatcgagactatcctggctaacacagggagaccctgtctctactaaaaatgcaaaaaaaagctgggcgtggtggctcacgcctgtagtcccagctactcaggaggctgaggcaggagaattgcttgaacccaggaggcagaggttgcagtgagccgagatcgtggcactgcactccagcctgggcaacagagcaagactctgtctaaaaaaacaaacaaaacaacaacaacaacaaaaagatatgtataattctaggagcagctggctctcttcactgagaattcctacttttgctcctttgctaaacctctgtatgccgtcctctcacgtgctgcctcagagcctagtatctgcccctcagagatattgaccttctttgtttttttttttgttttgttgttgttttcagacggagtctctcaggctggagtgcagtgtcgcgatctcggctcactgtaagctccgcctcctgggttcacatcattcttctgcctcagcctcccaagtagctgggactacaggtgcccgccaccatgcccggctaattttttgtatttttagtagagacagggtttcactgcgttagccaggatgctctcgatctcctgaccttgtgatccacccgcctcagcctcccaaagtgctgggattataggcgtgagccactgcaccttgcctctttatgcactcttaacctgtctcttctcattccttcgtcaccactggactttgggtaccctacgggtgatgttaaggctggtccccaacaattgttatttgtggaaactttccagtacccacgtatagccagcagcccctttaagggaacataactctccctggctggccaacaaatagcccggagccaagcagtcatcagctgtcgagtctgccagggagcgttgtccttcacggaaagcatctaaagcattagctctctgctgcgtgtggttagagtgtgctgaacgttttccgatggcttcatggtttgagttgacaggatgacatcatgtgtgcctaaggcagtgcccgtggtggcccaaaaagtatgtgcaatgagcagaaaattagcacacttgtctcaagaggaggtttgggagtgggtgtgagatggagcagggactccctcttcacggcctgtggatctcccaggcatagaaataaagaacaatcttgcttttcttcaaggtaaatttcagtcacctagttagccccaagaagtaaatatgcaacttgataagcaagaaggtaacggtagcctaaaacaatagccaaggaagctagaagcatcggatgtgtagttctcctgtagaaactaaagatggtggccgggcgcggcggctcacgcctgtaatcccagcgctttgggaggctgaggcgggcggatcacgaggtcaggagatcgagaccatcctggctaacacggtgaaaccctgtctctattaaaaacacacaaaaaattagccgggcatggtggcaggcgcctgtagtcccagctattcgggaggctaaggcaggagaatggcgtgaaccctggaggcagaacttgcagtgagcccagatcgtgccactgcactccagcctgggcaacagagcgtgactctgtctcaaaaaaaaaaaaaaaaaaaaaaagaaagaaaaagaaaaagaaagaaagaagcatgtgttatgggttgtactctaaggtgccagtaagtctgatgatcaggacaaagtagggggccctaaaggctggggtcgagcctaagtaaagctgcacacagtggagaagacccgtttagaagaccatgtgtggtctgtaatgtcagcaaggtttgtttgagccatcagttctaggaggcctctagcccgagagtataagagagcagaaagttgctttgaacgccttgttcaagagcccagcgttggccaggcatggtggctcatgcctgtaatcccagcactttgggaggctgagacaggtggatcacgaggtcaagagaccaagaccatcctgaccaacatggtgaaaccctgtctctactaaaaatacaaaaattagctgggcgtagtggcgggcacctgtagtcccagctactggggatgctgaggcaggagaaccgcttgaacccgggaggtaggggttgcagtgagctgagattgcaccactacactccagcctggtgactaagcgagactccatctcaaaaaattaaaataaaataaataaataaataaataaataaaagagcccagtgttgtgttggaacaggaattaaaacagattaaagaatgtgtaagcagaaactcagttgtatgtaagaaaacccaattccccctgagaacaagaaagagctggagtcttttaaaaattaactgcctgtttttctgtggctagtgagccttatctctcctcccttcccaggcattgtgaaggccctgtttccctagttgtgcagctgcaagttcactagacagataaactcaagttgcaaaacatgttttgccttgaaaagtaagaaatgatgtaatgcacgtctcaattaattgaataactctctttgtctctcgcttctgtaatatgcttccccctgcacagatctcccccggccccacaaaatgcttcaaaggtaacttaactctttgttcagggctcagtcctttgggtgttaatcggactgggctggtgcagctaaataataaatatcctcctgaaccccatcggtctctctgattccttatcaatctcgctacagtgtcgtttgagaaaagaactgagcaccttgatcactgtcagtagcatctgtaaccccaagggaagggcgggtcttggtgaaaccctgtattgtggctcagcaggagaacgtctggtgggattggtaaggaatatttgcatttaagtggcttccgtgatcacagtatacggaatagcctctgcaaaggtgggcggggaccctataaaatctatttgctctcagccctaccaacaggcttccagggattatgcctccttgattatatgtcatttgcctgtagactattcatctgcctgcacattgagcgctcagctgtggtgtttgagttttcataggtacacagatattcgtgaccttgatttttacttgagaaactgtgaggcaaaatatccccagagtgctttaacctcaaaatattgacctaggatacagttgttgccacagttttttttaagtgtgttttcggtttttttgttttgttttgttttctatgtttttgttgttgttgttgtttttgagacggagtttccctcttgttgcctaggctgagtgcagtggggcaatctcagctcactgcaacctccgccttccaggttcaagcgattcttcccccttagcctccgagtagctgggattacaggcacccaccaccacacccggctaattttttgtatttttagtaaagacagggtttcatcatgttggccacactggtctcaaactcctgacctcaggtgatccacccaccttggcctcccaaagtgctgtgattacaggcatgagccaccgcgcccggctggctagaccattgctaatggctcaagagttcagttctagcaattgtgctgaccctagttagggaatggtaaagctttcgttggtcactcacttgaccccatgggcctccccaggtgtctactggtcaggagagagaggggacctcctccagtgtcatggaatctgacaacagactgaggacagaagaagctgcttttttctacggtggataccccaagggcccaggtttccctctaagtcagtaccactttcatttcaggaaggagaccaccgtggatgggggctgctgcctgcaggacccgagacctgaaaactgaccaatcaggcagctggggtggggcctagagaactgaccaatcaggggagttgaggtggagcatccggatgagaactgtcaatcaggggggttggggcagagcctggagacctgtcaaatcaaaggagctgaggcagggcgtggaaacatgaccaattaggaaagctggggtggggcctgaagaactgcccaatcaggggagctcaggggatagcaagctgaccaaccagaagaggaggggcagagtctaaagaactgtccaatcaggggagttgggatgtgactggtgaactctccaatcagagatgagcagagaagagaaccatccaatcacagccccaggggcggggcgttgctgtcctccctgcagagcacacccggcctgccctgagtgaccacaggtgtccccgtcgtgctcacctgcaccggctgcgaggagcagggagctcctcaaagagctcaggaacggacaggacatggtgagtgcagggcaggagccgagccggagccggagccctgggaggggagggttggaagcggccagaacacgctgaaactcccgggggagccgcccggaacccccatgcagcctctgtccctgtgtcacccccgggtcctgcggggagtttcctcccctgccccagtcttcattccctggaaagtcgtagttgtcaggacgctgggatggaggggaaaaaaaggcagaaatgactcctgccctgtggggtctcgcgaagttaattggaagaaaaactaacccaaagtacaaaaaacaaaacaaaaaaaaaaaaaacctcaccccagcgaggcggtgcaacagccccaaagcagaatgcgctttggatgcagactttgggcccaggcccacgtccctgggaggggcgaggggtggacaggtggtgcgggcgctccacgtggcggcacgggctggcctgaccccaaaggcccgcaggccggactccagcccagccgcccctgcctgggcctctctccttctaaagattgatttggttacttgagcctcagattttttcagtcaatggaacatacagtaaataatagagtttgaaagataaaatatttccaaggaggtgaatttcagaaaaaaataaagttctcgtcttacattccatttgttaaaaattctagcgtgccttttttttttctttttattttctgttccttttttgcccgtgtggttaagtttctcacatctgttgttttattttcggtgatgacaaatgggattccagggcttagcccttgacggggctcccgggaaaaagaatcgcagagaaagagagaaaatctctcttttattatgacacgccccgaaatgaatacattcctacaagaaaaaaatgtttggtatataatttggtgaattacaaaaactcgctaaaatatcagttattctccttttccaggatggagaatttgtgatagatgataattctgttcttttattttttgtttttattttttgaaacggagtcttgctctgtcacccaggctggagtgcagtggcgcgatctcggctcactgcaacctccgcctcctgagttcaagcgattgattctcctgcctcagcctccccagcagctgggactacaggtgtgtgccaccacgtccagctaatttttgtatttttagtggagacagggttttaccatgttggccaagctggtctccaactcctgacctcaggtgatccacccgccttggcctcccagaatgcttggattacaggcagcatgtgccaccatgactagctaatttttttttttttttcagatggagcctcgctctgtcacccaggctggagtgcaatggcgcgatctctgcttactgcaacctccgcctcctgggttcaagcgattctcctacctcagcctcccgaatagctgggattacaggcacgtgtggccacacccagctaatttttgtatttttagtagagacggggttccaccatgttggccaggctggtctcgaactcctgacctcagctgatccacccacctcagcctcccaaagtgctgggattacaggcgtgagccaccacacctggcccctttatcactcttttatattcactcatagggatatattgttagtgttcattaattccactgcttgctagtgactattcgggtattttcaaattttttccattgtgaccagtgcccctaaagacattattacatgtgtgtccacttgaatgccttattctcagctgcactgcagtatatcctcatcctctccccaagagcctggtccacatattaccgcctacatctcagttgctggtaactccattattccagctttcctgtgtgaaataattagtcttccttgattcttcctgctctgtcttgccccaccttgagcccatgaggaaattttatatctcctctttttttaaattttttattttttgagacggagtcttgctctgtcaccgacgctggagtgcagtggcgcgatctcagctcactgcaagctccgcctcccgggttcatgccattctcctgcctcagcctcctgggtagctgggactacaggtgccctccaccacgcctggctaatttttttgtactttagtggagacggggtttcaccttgtcagccaggatggtctcaatctcctgacctcatgatccgcccacctcggcctcccaaagtgctgggattaacaggcgtgagccaccgcgcccggcctagatctcctcttatgctgctcttgcacaggactgcactgtgacacccaagctgacacgcctacttctcatctagtgcggctttcgcctcctaactggtgtcccggtgtctgtatgtgtcccctatgatctagtctcagctgtcagatgagatcactgctctgtgcaaaggcctggaggagtcactcagagccaaagtccttactgtggctgatgagttccccacaaagtgatgtgcctcacttcctgtcactcgaccccccttggctgtcactccccattcccctctgtccagtcacacaggctctggctgtgcctgaaagagccaagacccgctccttccatagggcctaacctctggctgtttctcccacccagaacaattttctcctttctatattttttcattgtatactacattcgccatgattaatttaaattggatcacatctgaaagcttctcttgtcgctaatttcagggaacagatgacattttactattttgggttgggcccccatgcctgtaatcccagcactttgggaggccgaggcaggtggatcagttgaggtcaggagttcgagaccagcctgaccaacatggtaaaaccctgagtctactaaaaaataataataataataaaaattagccaggcatggcggcacacacctgtaatcccagttagttgggaagcaggaggatggcttgagcccaggagttcaaggctgcggcgagttctcattgcgccattgcactccagcctgcacagcagagtgagaccttgtctctaaaaaattttctggccaggcacgatggctcacgcctgtaatcccagcactttgggaggccgaggcaggcagatcacttgaggtcaggagtttgagaccagcctggctaacatggtgaaacctcatctctactaaaaatacaaaaatcagttggacgtggtggcacacgcctgtaatcccagctactcgggaggctgaggcaggagaatcgcttgaactctgaaggtggagtttgcagtgagccgagatcatgccattgcactccagcctgggcgacagagtgagactccatctcaaaaaaaaaaaggccgggcgcgatggctcacacctgtaatcccagcactttgggaggccgaggcaggtggatcacaaggtcaggagatcgagactatcctggctaacacggtgaaaccctgtctctactaaaaatacaaaaaattagccaggcatggtgatgtgtgcctgtaatcccagctactcgggaggctgaggcgggaggatcacttgaaccttggaggtggaggttgcagtgagccgagatcgcaccattgcactccagcctaggtgacagagcgagactctatctcaaaaaaaaaaaaaaattctaaagactatgacacaggataaagaatatatgaaaacacagaggttgcagtgagctgagatcacgccactgcactccagcctgggcgacagagtgagatgccgtctcaagaaaaaaaaaagtatatgacatacacatatatacagttaaatgttattcagtcataataaagaaggaaatcctgccattggtgacagcactgatgaacctggggcacattatgctatgtgagacaaaccaggcatagaaagatgaataccggatgatcttacttacatgaagaatcaaaaagaaccagattcctagaggaagagagtagaagagtgattgcctgcggctgagggacaggggaagtggggagagatgttggtcaaagtgaaccaactttccattgtaaggtgaataaattctctacatccagtgtccaaatggtgactgtatttaaggatactgtaatgtatacttgaaatacactgggcctggtgcggtggttcacgcctgtaatcccagcactttgggaggctgaggtgggtggatcacgaggccaggggttcgagaccagcctgaccaacatggtgaaaccccatctctactaaaaatacaaaaattagttgggcatgtatagggaccagccccacagggtcggtgggtttctccccatgtgcagagacaagagagcgtagaaataaagacacaagacaaagagataaaagacagctgggcccgggggaccacaaccaccaagtcgcagagaccggtagtggccccgaatgccaggctgcactgatatttattggatacaagacaaacgggcaggataaggagtgtgagccatctccaatgataggtaaggatgcatgggtcacatgtccactggacagggggcccttccctgcgtggcagccgaggcagagagagagaggagacagagagtgagacagcttatgccattatttctgcttatcagagacttttagtactttcactaatttgctactgctatctagaaggcagagccaggtgtacaggatggaacatgaaagcggactaggagcgtgaccactgaagcacagtatcacagggaggcggttaggcctcgggataactgcgggcgggcctgactgatgtcaggccctccacaagaggtggaggagtagagtcttctctaaactcccccgggggaagggagactcccctttcctggtctgctaagtagcgggtgtttttccttgacacttacgctaccgctagaccacggttcacttggcaacaggcgtcttcccagacgctggcgttaccgctagaccaaggagccctctggtggccctgtctgggcataacagaaggctcgcactcttgtcttctggtcactcctcactatgtcccctcagctcctatctctgtatggcctggtttttcctaggttatgattatagagcgaggattattataatattggaataaagagtaagtactactaactgatgattaattatattcatatataatcatatctaagatctatatctggtataactattcttacttgatattttattatactggaacagctcatgtcctcggtctcttgcctcggcacctgggtggcttgctgcccacaggtgtggtggcgggcacctgtaatcccagctactcaggaggctgaggcaggagaattgcttgaacccgggaggtggaggttgcaatgagccgggatcgcgccactgcactccagtctgggtgacagagcgagactccatctcaaaaaaaaaaaaaaaaaagaaatatactaaaaggccgggtgtggtggctcacgcctgtaatcccagcattttgggaggccaagacagctggattacttgaggtcaggagttcaagtgcagcctggccaacatggtgaaaccccatctctactaaaaatataaaaattatccaggcatgttggtgtgcatctgtaatcccagctacttgggagactgaggcaggacaatcgcttgaacccaggaggcgcagcttgcagtgagccgagatcgccctactgcactccagcctggggcgacagagcaagactccgtctcaaaaaaaaaaaaaatgaaatgtactaagagtgtaaatcttacttgttcttaccatcagattttttaaaaaggtaactggtaacagatgtgttaattaacttcatggcagtcatttcccagtgtatatgtgtatcaaatcatcacctacaccttaaatgtatacaacttttatttgtcaaagacaaaaaaacctacgacacaggaagtgattacagacagaggggaagaggtctgaggactgagtcttaaatagatattggcagactgcaggatcttgtgtgagtgtcctatgaactgagttcagttccgcagtgctgtgagttttaccccatcctcatgtacacatatgtggtttgttttaggacacagtggtctttgaagacgtggttgtggatttcacgctggaggagtgggccttgctgaatcctgctcagagaaaactctacagagatgtcatgctggagaccttcaagcacctggcctcagtaggtgaggatagcattatttctgcacttagttattagataataaatgttttgtctggttgcagtggttcatgcctgtattcccagtgctttaggaggctaaggcaggaggatcacttgaggctaggagttgacaaccagcctgggcaacatagtgagaccttgtctctacaaaaaaaaaatcaaaaattagcccggtgtggtagcatgctcctgtagtcctagctacttgagaggctgaggcaggagaatcgcttgagaccaggagttcaaggctacagtgacccatgatcacaccactgtactccagccagggtgacaacttgagaccctgtctcaaataaaaaagaaaaaagagccaggcacggtggctcacgcctgtcatctcagcactttgggaggccaaggcgggtggattgcctgagctcaggagttcgagaccagcctgggcaacacggtgaaatgccatctctactaaaatacaaaaaattagctgggcatggtggtgcgtgcctgtaatcccagctactcgggaggctgaggcaggagaattgcttgaacccgggaggcagaggttgcagtgagccaagatcatgccactgcactctagcctgggccatagagtgagactccgtctcaaaaaataaataaataaataaataaatatttcttgctcattaagcctattctaagatttagaatgcagaaggggaatacattggttaataagacagttataatcattgatgtcctggacctaaaattcagtagcttctctgtgataataaaaatctacctatcaatctgtacttttctttctgccttgttgaaaagacttaggatcagccaggcgcggtggctcatgcctgtaataccagcactttgggaggccgaggcgggcggatcacgaggtcaggagtttgataccatcctggctaacatagtgaaaccctgtctctactaaaaatacaaaaaattagccaggtgtggcggagggcacctttagtcccagctacttgggaggctgaggcagcagaatcccttgaactcgggaggcagtggctgcagtgagtcgagattgtatcactgcactccagcctgggtgacagagtaagactctgtctcaaaaaaaaaaaaaaaaaagaaagaaagaaagaaagaaaaagaaaagacttagggtccttttgtgttaccagcgcaggtatatactggcggcacagagaggttaattgtttgaaaccttgtgatgatttttctgtgtatttaaaattgtctaccattttgactgcttgtacttttttttttttttttttgcttctcattagttgaaatccttgagagggacagcatcacagggactctgtgtccagtggtcttagcaggaagattgcttcagaatttggcatgaatcatgccactgtttctgtgggcctgaatgcccttccctcagatgattctggtttggtttggtttgccaccaggagttactgtgttgttgtttgctttgtatacataagcatgtctcttacccaaatagaattcagtttcatcttgaacataaacaccttcaattattactattattattattttgagacagaatcctgctctgtcgcccaggctggagtgcagtggcacgatctcggctcactgcaagctctgtgtctcaggttcacgccattctcctgcctcagcctcccgagtagctgggactacaggcgcccgccaccacgcccggctaattttttgtatttttagtagagacagggtttcaccatgttagccaggatggtctccatcccctgacctcgtgatccgcccgcctcggcctcccaaagtgccaggattacaggcgtgagccactgcgcccggccaaacaccttcaattttaagaagaactgtgtgctccctttggttctggagaccctgcttataggcagccaaaatggccttggaccaccaccttccagacacattttcttttgggagtcgtgttccctgcaggcctccacaggctccaagatggcagaaggagagctcttgtacttcttcataatgaagtcaggccgggcacagtggctcacacctgtaatcccagcactttgggaggccaaggcaggcgaatcacaaggtcaggagatcaagaccagcctggccaatatggtgaaaccccgtctctactaaaaataaaaaaaattagctgggcatggtggcacgcacctgtaatcccagctacttgggaggctgagacaggagaatcgcttgaacccgggaggcagagtttgcagtgagccgagatcgcgccgctgcactccagcctgggcgacagagtgagactccgtctcaaaaataaataaataaatagataaataaaataaaatcacataatgaagtcatgaaacaattaaacacctgaattacttctttctttgcagatgccttcctcatcatattggttcacttttttgtttcagataatgaggctcagcttaaagccagtgggtctatttctcagcaggatacttctggagaaaaattatccctcaaacagaaaatagaaaagttcacaagaaagaatatatgggcctcccttttaggaaaaaattgggaagaacatagcgttaaagacaagcacaacaccaaggagagacatttgaggtgagttgtacttagaagaaaaaggcagtatcgccaggcacggtggctcatgcctgtaatcccagcacttcgggaggccaagggaggcggatcacctggggtgaggagtttgtgaccagcctgacccatatggtgaaaccttgtctctactaaaaatacaaaaatgggcgcggtggctcacacctgtaatcccagcactttgggaggccgagggaggcggatcacctggggtgaggagtttgtgaccagcctgaccgacatggtgaaaccctgtctctactaaaaatacaaaaataggcgtggtggcatgtggctgtaatcctagctgctcaggaggctgagacaggagaattgcttgaacccaggaggcggaggttgcagcaagccaagatcgtgccactgcactccagcctgggctgggcaacagagtgagactctatctcaaaaaaaaaaaatgataattctgttagaaacaattatcagagagccccacatattactattgtttttgtaatggactgtggttgaactatctaccagagtatttcgtttattctagtttgaaataatttcaacagtacaggaaacttacccttgtatagaaaatggcaaaaatgttatcctaatattcattaatatatattaagaaataattggccggtgcagtggcttatgcctgtaatcccagcactttgagaggccaaggtaggtgggtcacctgtggtgaggagtttgtgaccagcctgaccaatatggtgaaaccctgtctctaccaaaaatacaaaaattagctgggcgtggtgccatgtgactgtaatcccagctgctcaggaggctgagacagaattgtttgaacctgggaggcagaggttgcagtgagccaagatcatgccactgcactccagcctggggaacaagagcaaaactccatctcaaggaaaaaaaaaaagaaattattaaggcataaaccattaataatgtgctacccatttttagcagaaatccaagggtggagagaccatgtaaaagcagtaaaggtaataaacgtggaagaaccttcagaaagactcgaaattgtaatcgtcatctgcgcaagaattgttgtactagtgtaagacggtacgaatgcagtcagtgtggaaaactcttcacccattcctcatccctgataaggcacaaaagagctcactctggacaaaaattatataaatgtaaggaatgtgggaaagccttcagtcgcccttcctacctacagacgcatgagaaaactcacagtggagagaaaccctatgcctgtcaatcttgcgggaagacatttcttcgttcccactctctcactgaacatgtaaggactcacactggagagaaaccctacgaatgtgggcagtgtgggaaaggcttcagttgtcccaaatcctttcgcgcacatgtgatgatgcacgccggagggagaccgtatgagtgcaagcactgtgggaaagccttcaggtgtcagaaatcctttcgagtccatatgatcatgcacgccggagggagaccgtatgagtgcaagcagtgtgggaaagcctactgctgggcaacatcctttcaacgacacgtgagaattcacaacggggagaaaccctataagtgtggaaaatgcgggaaagcattcggttggccctcatccttacacaaacacgcgagaacgcatgctaaaaagaaacctgtgagtgggggcagcgtgggaaagtcttccgcgaggcctcgcccctccacagatgtcaaatcacaaactagagagaaagtctataaatgtgaaacgtgtgggaaaacgtatggttggtcctcatctttacacaaacatgagagaaagcacactggggagaaacctgtaaatgcagccagtgtgggaaaaccttcaggcgggctttgctcttccaaaaatgtaagaacgcagattggacagaagcccagtaaatgcgaaaaatgtgggaaagctttcagttgtcccaaagcctttcaaggtcatgtgagaagtcacacaggaaagaaatcctgtacatctaagtaatgggggaaaacctgtgcaaattaattcacatacatggttcagaaaattcacagcaggagggccgggcgcagtggctcacgcctgtaatcccagcactttgggaggccgaggcaggcggatcacgaggtcaggagatcaagaccatcctggctatggtgaaaccccgtctctactaaaaaaaaaaaaaatacaaaaaattagccgggcgtggtggcgggcacctgtagtcccagctgctcaggaggctgaggcaggagaacggcgtgaacccgggaggcggagcttgcagtgagccgagatggcaccactgcactccagcctgggtgacagagcgagactccatctccaaaaaaagaaaattcatggcaggagaagaatctcatgacgtttataaatatggtattgcctttatcaggaccacatcctaaaagtgggcctctagcaaatgaatttgcagttctcttgcaggtaaagttgaggggagaatcctgtaagtcctctctcacctatagtactgaaattttgatacataatggttttttcttataaattactaatgtttctcttttcatttagaagtgtattgcacccatgggtgatctgatgtattttaatatgcattaactttaatttttatatattttttttgttactccgtgtgaggccattagaccaatgaaatatgggtgtttgttgacattttctgactggccctgtgtgttccaagctggatattactaccatgttacttttattccacctttccattttacagggaaaaactatttttaatgttaatactttctacttatacaggcaagtaattcagtggctttatgctattggtcagagaatccttcttcattttgcttgtggactaataggtagttggtagaaatacgtatgcatgcaaattcttggaggagtgtagtctcgtgggaactatttttttcatctgttgctgtttgctctttgacctggcttctgggttggaattggaaaataggtttttttgggttttttttctttttcttttttgagacagagtcctgttatgttgcccaagctggagtgcaacggcacgatctcggctcactgcaacttccgcctcccggtttcaagcgattctcctgcctcagcctcccaagtagctgggactataggcatgcaccaccatgtccagctaatttttgtatttttagtagagacggggtttcaccatgttggccagggtggtctcaaactcctgaaatctgcccgccttggcctcccaaagtgctgggattacaggtgtgagccactatgcctggccatattatcattatcttaatacctcattgtctcagtatttcttgtgcttctgtgttcctgcttccatgacagatacaatggtacaaccataaaaacacaggggattgcggctgggcgcggtgactcacgcctgtaatcccagcactttgggaggctgaggtgggcggatcacgaggtcaggaaatcgagaccatcctggctatcatggtgaaaccccgtctctactaaaaatacaaaaaattagccaggtgtggtggcgggcgcctgtagtcccagctactcgggaggctgaggcaggaggatggcgtgaacctgggaggcgaagcttgcagtgagctggaatcgtgccactgtactccagcctgggcgaaagagcgagactctgtctcaaaaataaataaataaagaataattttttaaaaaagcacaggggattgtttccctactgcatctactgtgacctagtattcttcgtgagataaatcttacctttcatgagaaaatgaaagacaatactggcttatcaggtaaactctggaaatttcctgtcacatagagctgaatacaatctctcagtatgtgttcagttattatgtttgattatgtattattaaaacaaaagtttctgtttctgagaaatatctatttactgtgtttgtgtttttaaagaagttggattctatacaaatggataaaatgtttcttagaaatagcctatttaactgagtttttcaaataagttgtatactaacaaatgtcaatctctgttttttatttactgggagaatgtattaaaatattgaaaattgccaaatcaacatggtgactttaaaaatgatacttctgggccaggcacagtggctcacgcctgtaatcccagcactttggggaggccaaggcgggcagatcatgaggtcaagagatcgagaccatcctggctaacacggtgaaaccccatctctactaaaaatacaaaatattagtggggtgtgctggtaggtgcctgtagtcccagctactcgggaggctgaggaaggagaatggcttgaacctgggaggcggagcttgccaagattgcgacactgcactccagcctgggtgacagagcgagactccgtctcaaaaaaaagaattatacttctgaattaatattaccagatgcattcagatttagacattttctttctagtacatttgtttcctatactgttataattttgtctaagaaattcttttttttttttttgagacagattctcgctctgttacccaggctggagtgcagtgccgtgatcttggctcactgcaacccccccgccaaggttcaagtgattctcctacctcagcctcctgaagagctgggattacaggcacccgccaccacacccggctaatttttgtatttttagtagagacggggtttcactatgctggccaggctggtctcgatctcctgaccttgtgatctgcccacctcggcctcccaaagtgctggggttacaggcgtgagccaccgcgcccagcctaataaattcttgtttattcataatgacaaaaacttacgtaacggttttataaatttaagtattaaataagtctagcaaaagacataaaaagataactaataaaacaagtttaaactttattggagcccagtagcaatggctcacgcctgtaatcccaggacccaccgaggcgggtggatcacctgatgtgaggagttcgagaccacgctggccaacatggtgaacatggtgaaaccttgtctctactaaaaatacaaaaaattggccaggcgtggtggcaggcgcctgtaatcccagctacttgggaggctgaggcaggagaatcgcttgaacccgggaggcagaggttgcagtgagccaagattgcgccactgcactccagcctgggcgacaagagtaagactccatctcaaaaaaaaaaaaattttttttttggataatatcaaggcagaataaagtatagtatcaaacttgacaaggtagataatagggaatgcagaataaaggatcgggcttcagtaagtgacaatctcatcatgaattcatttatagttccaccatgtaatatgtcttaaatactatttctttttttttaatactatttcaagaactgctcatgagttaggaaatagtgagcagtaatacagaaataacggcaggaccaggggcagtggctcacacttgtaattccaaagcttcgggaggctgaggcaggaggatcacttgagcacaggagttcaaggccagtctgggcacatagtgagacacagtctctataaaaagaaatttttaaaagtatctaggcatggtgatgtgcacttgtagagccagctactcaggaggctgagggtggaggatggcttgagaccaagaggtccaggctgcaatgagttatcttgccactgtactccagccagggtgacagaatgagaccgtgtgtcaaattaaaaagaaaaaaagaaacaataattatttccctggccgggcgcggtggctcacgcctgtaatcccagcactttgggaggctgaggcgggtggatcacgaggtcaggagatcaagaccatcctggctaacccggtgaaaccctgtctctagtaaaaaatacaaaaaattagctgggcgtggtggcaggtgcctgtagtcccagctactcgggaggctgaggcaggagaatggcgtgaacccaggaggcggaacttgcagtgagcagagatcgaaccactacactccagcctgggcgactgagtgggactctgtctcaaaaaaaaaaagagacaaaaggtatatttatggttcagcctcatttctgcaaatattaaaaattttagggcatgatgtatacattttatatatatatatatatagtgtgtgtgtgtgtgtgtgtgtgtgtgtgtgtgtgaatgtgtgtgacggagttttgctctgttgccaggctggagtgcagtggtgcgatctcagctcactgcaacctccacctcccaggttcaagcgattctcctgcctcaccctcccaagtggctgggaatacaggcgtgccccgccacgcccagctaattttttgtatttttagtacaggtggggtttcaccttgttggccaggatggtctcgatctcttcacctcgtgatctgcccgccttggcctcccgcagagctgggattacaggcgtgagccaccgcaccaggcccatgtcatatgtttttatgagtttggacattggcatctgggaccaggtacttcatctggatttgaaccacaatgtgggtgtttgtttttaatacctttgtgaaataattttaaattgccttatatatttggcattgtcactttgctgcccctacacactgatggaaaaattgtgttctgcagaaaactagagttcctcacagggtgaggaagagttatggtcatctgcacagttgtagcccgttgcgagtgttttcccatgtgcacagtgatatctaggcaagtgtgccatgatttcctggtgaggataaaatctatggacggtgagagaactagtcaaggaataactgaagtgagctgcagacaggattatcattttgagtaacatcccaatgtatttgtcatcctttaattaatttttatttttttaattaaaaaataatttttaagtgtaaacctttaatgatccacaaagcccaaaatgtccatttgattttcataggtatcgtttccatatgcttagacttccagcagctattagaagagaaaaatatgtaacagctttgtgtttaattaaaggcaaatgaaatccagtctgtgtccattttcaatgttaatagtcttgatagcgggccgggcgcagtggctcacgcctgtaatcccagcactttgggaggctgaggtgggcagatcaccggaggtcgggagttcgagaccagcctgaccaacatggagaaacgctgtctctactaaaaatacaaaaattagctgggcatggtggtgcgtgcctgtaatcccagctacttgggaggttgaggcaggagaattgcttgaacccgggaggcggaggttgcagcgagccgagatggcgtcactgcactccagcctgggcaacaaaagcgaaactccacctcaaaaaaaaaatagtcttgatagcactgcaaagacttcgtgtcatttcacaatcacagttagcttatttgatcactccttccctacattcctctcattgtacaaattggtaccagatggaaagtgctgactgtgagatgtccaggttcttgacgcattgaacaaagaattgaacaaaacacacaaagcaatgacagcgcagatttatttaaatgaaagtacactccacggagcgggagccggccctagcgggcagctcaagagccctgattgcaatgttctttagggtttttataaggctacaagaattttgtaacacccctaggtgccctttagagaactccaattggttaccccctatgaaggattcgcctgcaaccaatcagaggctgaagtgaagacttggccatggccaatcagaggctgaggtggagacttggccctgtcaaatcagagtctgaagtggagacttctatcttgttatcacagcagtgaggatgtggcctgtttctgcctaatcttgcctagaagtggctgcacctgctgttcctttgcttatgccttaactggttatcctaattccctattctcctgcctcaaaatgacaagttaatcacaagcagcagactcatggttaaccttacatatcccaaaatagtaatggaatgtctccatagtgaaagcctgatgtgtcttaccacctgtattgggcactgttcgaatttttatatttcaagacaagtcatcttcttctggataaaaaataaaattacacagtttgccaagtatggcattaggtgttttgttgttgttgttgtttgtttgttttgagatggagttttgctcttgttgcccaggctggggtgcaatggcgtgatctcagctcactgcaacctccaactcccaggttcaagtgattctcctgcctcagcctcccaagtagctggggttacaggcgcatgccaccacacccagctaattttgtatttttagtacagacagggtttcaccatgtaggccaggctggtctcgaactcctgacctcaggtgatccacccacctcggcctccgaaaatgttgggattacaggcgtgagccaccgtgcccggccagcgttagtttttaaccagagtattcaaaagcatccatttatatgacattctggatagagcaagagtataggaatttagaaccagatgaggcattaagggtcacaggacagtttgtctccaaaagggcagaaggaggcttttaggggtgacagagtgttttgtatcttgattatggtggtacaagtatgcatttgtgaaaacccagctccatttaaattgtaaagtttactaattttaaataacggaaaacaaaataagcaaagtctcattgatgaactaagaaaaaattaaaactcatccaatctttgatgtttagtttgcaacaatagtagtttccacttctcaaagactcgtgacccatcaagacttttttggaacccattataaagttaggaagcacttgccagggtcatagctgccctcaccgcagccacttaacctgagggaagccacagggcaccagcaatgcccctctaagttcacaccaagttcctggggtcagaactctgagaatgctgtggtttggaacctaaaaggaattctacagagttccaaaggggatccttgggtggagggaaggagtgtcttatccttgggcatttgaatcacgtcttccaaggttctatcctgaggccatttgcagctcagttctagctccctgacatatcagggtcaaacccagttttgtttttgttttgagacggagttttgctcttgttgcccaggctggagtgaaatggcgcgatctcagctcactgcaacctccgcctcccggattcaagcgattctcctgcctcagcctcccgggtagctgggattacaggcatgcacgaccctgcccggctaattctgtatttttagtagagactgggtttctccatgttggtcaggctggtctcgaactcctgacctcaggtgattcgcccgcctgggcctgcaagttgaacctgcatatctttggagatctggaacacacgctaagttcagaaccagaaccggaagtgctgaggagctttccttctagtcccgcccctcacgctgtcgcttacgcttccagttagcaacttggtcgtggaaaacacctgcctgtggccaagagacgtgaagttagagcttcagaagcgtccaggccgggcacagtggctcacgcctgtaatcccaccactttgggaggacaaggcgggcggatcacttgaggtcaggacttagaggccagcctggccaacatggcgaattcctgtctctgctaaaagtacaaaaattagccgggcgtggtgacgcatgcctgtagtcccatgtactcgggaggctaatgcaggagaatcgcttgaacccgggaggcggagcttgcagtgagccgagatcgcgccactgcactccagcctgggcgacagagcaagactccatctcaaaaaaaaaaaaaaaatatatatatatatatatatatatgaataaagtaatctcacatttgaatgaagaatcatgaatcctaatgggacaatagggtgcccaactgttcatatatttataaaggagtgggacttattccaggaacttaaatgtttccatattggaaaatccaaatacgttcatataattcaccaaggagatgagaaatatcctcagggaggtaagggtgtatttgtacataagtaaatttctatttctgtttagaaatacttgtttagatcgcttctcggccttttgggtaagatcaagcgtaaaaatacttgtttaggaaaataattccttaaagtgattaaaaatacaactatctcaaaattagagccaaattcaaagacttcatacattagtagggtcacctggtgtggatggaaggacatgtcacataatgccagtgttctgactttctatggctgcataatgccgcccccaaaattatttatttattttttattttttgagacggaggtttgctcttattgtccaggctggagtgcaatggtgcgatctcggctcaccgcaacctctgcctcccgggttcaagcgattctcccgcctcagcctcccgagtagctgggattagagatatgtgccaccacgcctggctaattttgtatttttaggagagacgcggtttctccaggttggtcaggctggtctcaaactcctgacctcaggtgatccgcccttctcggtctcccaaagtgctgggattacaggtgtgagccaccgcgcctgcccccgcccccctaaaatttagatcacaacaaccacatttattttgctgaggaacctgatatttatccaggactgggcagaggcagctcatctttgccattctccagttccacacgggcacaaattggggtggttttttcgcattcgtttttatagggcctttcacgatgtctttttatctcgggaaccatggggaactttacggcaagtaacaatgttcacacataaaacaggacggtgtcatttttctctttttgtgcacacaagtgtcaatttttactgcaccatcagtaagtctagatttaatccaatatgaaagaaagtcaaacccatcacaaaagagcaaggttattctggcttgagctctaaaatgcacaagtcattgtcctctgcagtcttgtaaatagcctgacatcagttgttttaaggttttaagtagtctgcgttttcattagttatcactagatggtagcagagagcatcggtcagaattaataaaagagggttaaaccagctcaagcaagcgaagccaatggctgtagtatttaggaagctgctcagaccaaggctatggctgaagcagcccacccattctacacacacgtggggcccaggaacctttgtaaagtcctctactgttggaccttgtgtcttgccaagtggctgtcagtgtaggctggcatttagtgctgcgtggccttattgatggttacaaccattttttctgctttggtaccacccgccatctaccggaactcttcagtacatctccacgtggatctgagctgagcttctcccgctttctctgagagcatttccagccaatatgtgtctgcttggtcatgtccttgcctctgccccttagccaggaactttacacaaacataaaatgtatctatacctctacatcatgccataaatgaaaattgtttccagatttatcaccgaagataaatgtgaaaacataagagatcatgaattggaataagcaaacatttctgaaaacacaaaaacaccataaaatagaatgaacagatattagaagctacaaaacaaaaggcaccatagcagagtgaaaagagagtttatagaatggaagaagaaacgtgcgatacacagatctggcaaagggcttgcatacagagtctaaacgctcctataaattactaagaaggcaggcagcacaatagagaagtaaaattacagatttgattaatcattcacaaaggaagcttgtccaagtggctaatatttaaatgataattcagttttttcttaagggaaatgcaaattagagcgaaaatgacatactactactccctaccatactgactgaaagcccaaaacatccaggaaaatgctattgctgaatatgtgcaacagaaatgctaagttgtggctggcacagtggctcacgcctgtagtcccagcattttgggaggctgaggcgggaggatcgcttgcgcccaggagttcaagaccagcctgggcaacacagtgagaccaccccccccatctctaaaaagaaaaaataaataaaaattaaaaaaatgctaagttgctacaacgtctttggaaaactgtgccttttgcatggctcggtatgtttagatacacaaatccttattgtggtggagccccttccttccgagctttccggaaaaccaacgacacaactccccaaacaggaagcacaacccgcttgcacctgtgcaccatgctcggttggagctcccagctgcctccagggcacagcggctttggaggaggggccgcgttgcatgctgggagcaatctgaggggcgggaccctagcgtttaagggctgtccttttttgaaccacatttccaaagcgctcgggttccccgagtggtgccccaagcagtggacgagcaaggtgcccgagaaggaggggaccacagacaccgcctggtgtccacggactaccaggaagccagggggcggtggcctccgtggggaatgcgcatgtgcggtcccgagcctcaggctagcgttcgggactagagtggggcgtcgccgccgcatgttgcacctgtcggcagcgcggcctctcccggatgtgacgtagcgtgacgcctgcaggattgatgctgaaatgacgaggtggcagcgccggttcctgtagctgaggggtgtgagttcgaggtctgattgtcctcgttttctacttccggtcacctcactgccacatggcaggcctccaggggaatacgcttaagatgagacacctgcgcatctctctttttttttttttttttttttgagacggagtctcgctctgtcacccaggctggagtgcggtggcgcaatctcggctcactgcaagctccgcctcctgggttcacgccattctcctgcctcagcctcccgagtagctgggaccacaggcgcccgccaccacgccccgctaattttttgtatttttagtagagacggggtttcatcgtgttaaccaggatggtctccatctcctgaccttgtgatctgcctgcctcggcctcccaaagtgctggggttacaggcatgagccaccgcgcctggcctctttttttttttttcttttgagacagagtttcgctctgtcacccaggctggagtgccgtggcctcatcttggctccctgcaacttccacctctcaggttcaagccattctcctgcctcagcctcccgagcagctgggactacagacgcgcaccaccacgcccagctaatttttgtatttttagtagagacggggtttcaccatgttggccaggctggtctcgaactcctgacctcaggtgatccacccaccgcggcctgccaaagtgctgggattacaggcgcgagccagcacacccggtcacacctttgcatctctaggcaagattcgtagtcagaagacacaaaaccagacttggaattcctgatttagggttgaaatggcctcaagcctgggaatacgtgcagatacctaaggactggaattccgcccaggatgaccctcaaagggaagttcacgtttcagacctacggtgtgtgcagagctcaggccccaggaacttggggacagaggtgccttctcgcttctctctgaatctgtgtctgaggtgagagaggcatggccctggtggcctttcttaatttcaggttgggttccaagaaagcaatgacggctcgcgatttcttctttctcacgccattctctgttcggttgccaaggaagtggaaaaaaattggttttgcttatctaaaaaggttcaggtgagtttatttttattatttatttatatgtatttattttttgagatggagcctcgctctgtcgcccaggctggagtgcaatggtgcaacctctctgcaacctccgcctcgcgggttcaagcgattctcctgcttcagcctcctgagtagctgggattacaggcattcgcaaccacgcccagttaatttttgcatttttagtagagacgggtttcaccgtgttgaccaggctggtcttgaactcctgacctcatgtgatccacctgtctccgcctcccaaagtgctgggatgacaggcgtgagccaccatacctggccgacttgctgtttaattcagcaaaaaggtgttgtatttctgctttgctgtgacatgtatcggaaaattgagcatatggaaataatgagtgtgaagagcagcatgtgctcctgtttgggcattatgcctcattagaaaaaaatctggcctttccggaggttgcagtgagccgagattgtgccactgcactccagcctgggtgacagggtgagactcagtctcaaaaacaaaacaaaacaaaaactaccatctcctataaaagggcattaaaattttccaaaatttgggattttgaacaccgtcccaatttagtatcaaagtatttttgagaatgccaaatatcctttgatactaaattgggacgctgttcaaaatgacacagtgtctgcagctcaccttcattattcctagactctcccttaccatccacagctcttcttgcatctaccggatcaccaagaacttgcacagctatcattctgcttgtaggaaagggcacatgctggattaaaaccgtgcagatgaccacatccttttacaaaccaggggcaactctgtggcttcctaggctacagattctctcagactacactagcagcaaattgagaaggccacctctttaatacaatttacaattcattcaaaaggactctataaacagccacacttgatggcccgaataactggtgagactctggtgaccttttcacttcataggtacatatcatattacctaaagcttttgagcattgcaaaaataaagatggaccggccaggcatggtggctcacgcctgtaatcccagcactttgggaggccgtggcaggcagatcacgaggtcaggagatcgagaccatcctagctaacacggtgaaaccccatctctattaaaaatacaaaaaattagccgggtgtggtggcgggcacctgtaatcccagctactcaagaggctgagccaggagaatcacttgaacctgggaggcggaggttgcagtgagccacgattgcgccattgtactccagtctgggcaacagagcaagacttcatctcaaaaaatcaatcaataaataaagatggaccatgagagttttattttgtaggaaattattactctgttaactccatgaatgcaggactgggtatcactccacactatttacaaacaccctgagcagtccctgtgatagtgtttacttaacacatactgagtgatggaaatataaattaataaatacatcctcattctccaatgccccaccatccatagaaaaaatgcaaaatacgtccctctgttttcccgattatctcccttgtggattattttcttccaagacccatttttttttttttttcggacgaaatcttggtctgtcgccaggctggagtgcagtggcaggatctcggctgacggcaacctccacttcccgggttcaagtgattctcctgcctcagcctccccagtagctgggattacaggtgcctgccaccaggcccggctaatttttgtatttttagtagagacggggtttcaccatgttggccaggctgatctcgatctcttgacctcatgaaccgcccacctcagtcccccaaagtgctgggattacaggcgtgagccaccgcgcctggtccccaagacccgtattttttatatcaagtctctacttgttacattaaaatctttactttttaaaaaaaatctcttttcccagaaaaatacacgccctcgaactgcgaggacttattctatattgagagcctgctgtgtcttgattacttttcagcctaattttttgttttgagcttacaatgcctggtatataagagaggctcaaaaagtaggatcaggttaaaatcatggtctttgggctagaaggaatttttcttttcttttcttttctttttctttttcttttttcttttcttttttttttttttttgagacagagtctttctctgttgcccaggctggagtgcagtagcacaaactcggctcactcccgggctcaagtgactttcctgcctcagcctcccaagtagctggaactacaggcacatgccactgcacatggctaatttttgtattttttatagagatggggtttctccatgttacccaggctggacttgagctgctgagctcaagtgatccgcccacctcagcctcccaaagtgctgggattacaggcgtgagctactatacccagcctacgaagacttgttctgaatcctgatcctaccttataacttgctagctttgtaatctgtaagtctgttacccacaaaaggagacaataaatgtatctacattatagttttggaagattaagtgaatttatatatgttcattgaattataggaaacaaaaccataccagatatatggtaagcaatattcaactctttacatggaaggaaaaatcagcccttgagaactgggacctggcctggcattcgtcccacgccacatgattctgttgaacagcaatgattttacaccaccccgacatcagatggggccacggggtgagaatgagcaaagcaaaaacaagagtgcagggaagttctccaggtggcctgagactgacccaatcttccccactcttgactgtagctctcaagaataactagaatgtactgggaatgcagccgggcacggcggctgatgcctgtaatcccagcactttgggaggccaaggtgggcggatcacctgaggtcaggagttcgagaccagcctggccaacatagtgaaaccacgtctctactgaaaatacagaattggccgggcgtggtggctcacgcctgtactcccagcactttgggaggccgaggcgggcggatcacgaggtcaggagatcgagaccatcctggctaacacagtgaaaccccgtctctactaaaaatacaaaaaattagccgggcatggtggcgggcgcctgtagtcccagctactcaggaggctgaggcaggaaaatggcatgaacctgggaggcggagcttgcagtgagccgagattgcgccactgcactccagcctgggcgacagagccagactccatctcaaaaaaaaaaaaaaaaagaaagaatgtactgggaatgcaacattccgagataagcggggagctggctagaacactcaggttctgctctagtccccgcaagaacaggatgttctgctttagcccagcatgttctcttgcccctgaggtatatcacctggggcaggctgccttttggggtccctaatatggagtgcaagtgaggctccatctgctccatttgagactccatctgctccaggcagctgtctgagccttggaggagcagctcacaatgaattgtaggcttctgttgtcccttgctgcctatctgtaagtaataaacccatgaaattccatgtaactcaacgagttccatgtaacttgttgtatgtgggtgttctctctcaccagagtcagataagttgctaaccagtgcacactgaacctgcttcacaaagagtactgtgtaatcatgtcattacacggaataaaaaattatgcaaacaggccaggcgctgtggctcacgcctgtaatcccagcactttgggaggccgaagcaggtggatcacgaggtcaggagttcgagaccagcctgaccaacatggtgaaaccccgtctctactaaaaatacaaaaattagctgggcgtggtggcagccgcctgtaatcccagctactcgggaggctgaggcaggagaatcacttgaacccgggaggcggaggttgcagtgagctgagatcaggccattgcactccagcctgggcgacagagtgagactctgtctcaaaaaaaaaaaaaaaaaagaagaaagaataccaaatttttttttttttttgagatggagtctcactctgtcacccaggctggagtgcagtggtgcgatctcagctcactgcaacctccgcctcccgggttcaagcgattctcctgcctcagcctcccgagtagataggattacaggcgcgcaccaccacacccagctaattttggtatttttagtagagacggggtttcaccgtgttggccatgctggtctcgaactcctgacctcgtgatgtgcccacctcggcctcccaaagtgctgggattacaggcgtgagccaccacacctggcgctcccagccttctaacatgcaacttctgagatttccattcctcatgctgtgtggtcacctcattgtgaaataagtcaacagaccctactttgttcaactgcagttgtgtttctcatgggtttgggctggtgagcattgacataattaatgtgtgagcttttcttcttctgaataagtcattttaatgagaaaaatgtttaacattataagagtttaaaaattcacataaaaattctggaacatgcactatagcatcagaacatatttaaaaatatacagttatacacatgatttgacaatccataattgtactggaatattttaacatatcccttctcaatacatgaaagatagttaaaattttaagtttacagcaaatataaaaacagttctaggattgttctaagaaatacctacagaaccttgtgtttggcaaaaaagtagattatttttgcaaacataaaaattatgataacacaagtttatcatttagaaactgcattcagctctgaatgacagaagactcctataatctgtttcgtatatctacaaagtgcatacttctcatatgtattgtccagaaacaaaaagtacagggtaaatgcaaccacccaacactacaatcaggaaacaatttcctgatgccataattgtaactttcagggtacagtcaagaacatgaggacaggccgggcacgggggctcgcgcctgtaatcccagcacttggggaggctgaggcgggtggattacctgagatcgggagtttgagaccagccagaccaacatggagaaaccccgtctatactaaaaatacaaaattagccgggcatggtggcgggtgcctgtagtcccagctactcggaaggctgaggcaggagagtggcgtgaacccgggaagcggagcttgcggtgagcagagatcacgccactgcactccagcctgggctagggagtgagactctgcctccaaaaaaaaaaaaaaaagtaccgacgttgacatgggaaatcttgtacaacacatgatgtactctagattttatcatcttcaaataacaaggtctaccttcttacttcataacttttgtgtccaattcccagccaggagctgggagacacagaaaagggtaaaagagaaaaatgagtcagatgagggtgtccctaggccacagccttgtattttgcaatttctgccaggatcatgaaatactgtgtccactgagtaaaaaaaatgctgaatatacattttctaatactaaagactaaaaccctcaaaaaacatggtgaaaccccgtctctactaaaaatacaaaaaaaattagctgggcatggtggtgggcacctgtagtcccagctattcgggaggctgaggcaggagaatggtgtgaacccgggaggcggagcttgcagtgagccgagatcgcgccactgcactccagcatgggagacagagggagactccgtctcaaaaaaaaaaaacaaaaaaacaaaaaaaacgaaaataaataacctttaagttcaaactttcagcctgcagaactatgagagaataaatatgtttcattcggccaccaactttgtggtgatttgttacagcaccccttgcaaacacttaaaggagtatttaccagctgtttctctcaaaaagaatgagaaataatgggctagaggtctactttaacataaggcactaataaacccatggctcgacttaagacctttataaacattttctaacggtattgaatttattcagtacagtaagtcatccgcacggaacctttgccacattacttactaacatagggtttccctccagtgtgagttttcatgtgttattttaaggatgggagaccacagaaagcttttccatgctgcatacatttagagagtttctctccaatgtgaatccttatgtctttgtaaggacgagagtctaccgaaggcttttgtacactccttacattcgtagggtttctctctactgtgagttctcaaatgtcctcgaaaagatgatgaccaactgaagactttcccacgctgctcacacacatagggtttctctccaatgtgaattctcacttgtgttcggaagtatgagggactactgaagactttcccacattccctacaggtgtacagtttctctccagtgtgagtccttatgtgtcccttaaaggaggagggagaactgaaggattttccacactgtttgcatccacagcgcttttccccagagtgtgttctcatgtgaaccctaaggtccgagggccaactgtaggtgttcccacattccacacacctgtaggctttttctcccgtgtgcattctggcatgtatgatcaggtagaaggaacgaaagaaggccttcccacattctttgcatttgtaggctttctctggactgtgaacattttttttttttttttgagacggagtctcgctctgtcgcccaggctggagtgcagtggcactatctcagctcactgcaagctccgcctcccgtgttcacaccattctcctgcctcagcctcctgagtagctgggattacaggcacacacaaccatgcctggctaattttgtatttttagtagagacagggtttctccatgttggtcaggctggtcttgaactcccaacctcagatgatccacctgcctcggcctcccaaagtgctgggattacaggcatgagccaccgcgcccggcttgtattttttttatagagatgggctctccctatgttgcccaggctgatctcgaactcctggactgaaacgatcctcctgccttggcctcccaaagtgctgggaatacaagtgtgagcaaccacatctggcccaacttgcataaaaccttctaagtaggcggccacatttttttcaattactttccattgctaaaatttctctggtcaatttcagacacaatgactgacaggccagcctgctactcatagaaggtctggctacagaacatgagaagaacaggtaggtgccagcaggcttccaagtgaaaggaacacccattttcacttcaattatttatccctgcttgaatgtaacatcgtcaaaaatcaccatgatagataaaaagaatgtaacggtagaagtaaatcttgtcattggaagtgataatattgcttttctgagaaactaaacataactgcaaaactgccagaacttgataaaatacgtgcaatatacataattaaatgtattgatggactaaaatttcattttctggaaaaagtatataaaatattgaggaagaggctaaacaccacctgccgggtctgtgtgaggacaatttcaggtatctcatgagaaggtgacagagaggtcgcccatgggtatataaacaactttgtgagggcgaagactcctcaattcaaatgcatttgcattctgtaagcatattgagttcagtgggccaggcacggtggttcatgcctgtcatcccagcattttggggtcctggcgggaggccatgagttcaaaatcaacctgggcaacataggtagagcctgtctacaaaaaataaaaagagttaactggtccacgggttctggtttacagtgagctggtttttttgttttttgttttttggtttttttttttgagatggagtctcactctttcaccagggctggagtgcaatggcacgatcttaactcactgcaacctccacctccctagttcaagccattctcctgcctcagcttcccgaatagctgggactacaggcgctcgccaccatgcccagctaatttttgtatttttagtagagacagggtttcaccatgttggccaggatggtctcgatctcttgacctcgtgatccacccgcctcggcctcccaaagtgctgggattacaggcgtgagccactgcacccggccgagctatgatcttgtcactgcattctaccctggacaacagagcaagacgttgtctcaaaaaaaaaaaaacacaaaaaaaacaagagagagagattgagagacagttaactggtttatcccaaatttatttatttaattttatttttaaattaaatttaattttttttttcagacagtatctcattcttttgcccaggctggagtgcagtggcaggatctcagctcactgcaacctccgcctcccaggttcaagcgattctcctgcctcagcctcctgagtagctgggattacaggcacgcgccaccaggcccagctaatttttgtattttagtagagacagggtttcgccatgttggccaggctggtcttgaactcctgacctcaggtgatccacccacctcagcttcccaaagtgctgggattataggtgtgagccaccacgcctggcctggattttgttttttttttttttttttgagacggagtctccgtctgttgcccaggctggagtgcagtggcgccatctcggctcactgcaagctccgtctcccgggttcagccattcccctgcctcagcctcccgagtagctgggactacaggtgcccgccaccacgcctggctaatttttttgtatttttagtagagatggtttcaccgtgttagccaggatggtctcgatctcctgacctcgtgatccacccgcctcggcctcccaaagtgctgagattacaggcttgggccaccatgcccggccccggatttcttgatctaaagaatgtccgccgggcgcggtagctcacgcctctaattccagcactttgggaggccgaggcaggcggatcacgaggtcaggagttcaagaccagcttggccaacatagtgaaacccccgtctctactaaaaatacaaaaattagccggacgtggtggcaggcgcctgtaatctcagctactcgggaggctgaggcaggagaatcgctttaaccctgaaggcggaggttgcagtgagccgagatcacgccactgcactccagccggggcgacagtgtgagactccgtctcaaaataaaaaaataaataaaacaaaaaacaatgtccaacaaaaaaacaaatccagcgaggccagacaggataggggctccctggggtccgcccattttcgggatcaggtgactcgaggtttggtccttattttagtgcaggctcagatgtcgggggcgagccaaagtgcaggggcctgtgggaaggacaggaggctgggaaacgtttgggtaaaaaaatcaggacactggccgtgcgcggtggctcacgcctgtaatcccagcactttgggaggccgaggcgggccgatcacgaggtcaggagatcgagaccatcctggctaacacggtgaaacctcgtctctactaaaaatacaaaaaaattagccggcgtggtggcgggtgcctgtgtcccagctactcgggaggctgaggtaggagaatggcctgaacccgggaggcggagcttgcagtgagccgagatggcgccactgcactccagcctgggcgacagagcgagactccacctcaaaaaaaaaaaaaaaaaaaaaaaaaaaaatcaggacactgacagcacgtgctccagcacggggcagggcctccatggggtccgcgcccacgcggggcagcgcggtgacgtcacggctgaggaccccgccccacgaagggctcaccccacgcgacccacgccgctcgctcgcccctcccctccacgcagcactccggctgctccgtggggaaactgagtctggacttctcgtgcccgttcgggagaaggacgcgggaggcgcggccgagctgcggggagaggttgggctcaccccgggccagagcgagttcgcgcaaacgggagtgtccaccgctggcgggtcagccactagcgttggctacgcgccggtcactcgggcgacaggaggcggggcggcgcggaagttatcttccaatcaggtgctccgggggcgggtccggaaaactgtccaatcaaggcacggggcggacaccgggaagcggattgcaggtttgcagtagtgtccaatcgaaggccccaggggtgaagggggcgtgtccaaaacgctgtccgctcagagcgttgaaagggcgggggcttagagattgtccaatcagggcgccgcttcctgagctccgaggccccgagggcgggacgtttcgtcctccctgccgcgcgtgccctgcctaccacgagcggcccgggagtacctgtacctttcagctgcgccggccgcgaggccacggagagctcgccttggagagcccaggagcaggggagacatggtgagtgcgaggcaggagcagagccaggggacggtcggagcgacgggaaccggctggaaccagagtccgccgaagtctgcggccgggattggctgagggacgcgcggggcggcgcaggactagcacctgggacccggggacgccatcacagcggccgggctggaggactgggggcagtttggggggacggaaggggcggcaaggagcttgggggtaacttagggggaggcctgggcaggaggggggctggaggtagtttggggggacggtaggggcggtcaggggtcagggaccagtttggggggacggcaagggacggtcagcaggttggggatgttacgcgtgtccgtataagaggtcacctgagcaggcttagtgtgagccacaaggctgtttactcacttgggtgcaagtgggctgagtctgagaaaggactcagcaaagggtgatgggattattattggttttatttttttattttttttatttttgggacggagtcccgctctgtcgccaggctggagtgcagtggcgtgatctcggctcactgcaacttccgcctcccgggttcaagcgattctcctgcctcagcctccggagtagctgagattacaggcgcccgccctcacgcccggctaatttttgtttttagtagagacagggtttcaccatgttggccagaatggtctcgatctcttgaccttgtgatccgcccgcctcggcctcccaaagtgctgggattacaggcgtgagccaccgcgcccggcaatcattagtccttataggtttgggacaggcatcggagttaggagcagtttttttgaggacagttggtgggtgttacaaagtacattctcaagggcggcgacgatgtttcaaagtacattcacaagggcttgggggatgtattgtcacaagggctgggaggaatattacaaagtaccttcacaagggcgcgagcgtgtattgtcacaagggcggggtacattcacaagggcgaggaggacgtatcgtacaaagtacattcacaagggcgggggaatatcacaaagtacattatcacaagggcggggggcttgaccatggtgcggccagctcagagaaccttacaggggacagcttggggggatggcaagggacggcctgggggtcagaggcagtttgggggacgacctcagcggtgggagttagctgccctgggggttttgttgcagggtatcactaatgctgtgaaagctttattcgggcagccggtgtcagtaaatgtactgtactgttctcctgtttggcttttttcttctccttagtgacaataggaaaatgttcaagtgtgttttctgccttctggtccgtcaggataacacctgtttatcgtggggtacaggctaagcatggcctaaggaagtctctcaggaatattctgtctcccaccagaattgtagagaaagtgtgcgcagttccacatcttatagcagctagagatggattaaaatgttcataaaaatagtagtttttcaaatgccaaagcaatcagacaaaaaataatagttattcttccatacaaggtgcagagtttgcgacagtgtgtgatcgtgttccatttcagttcagctagacatgagattaatgcaaattctgcaaaaacctgtaaaactgaggcgtgttccattctggttagtttccagtttgtcaccaggagtattgcttcactgatccatcatctgtttgctgactgggaaaagcagtttctggccatgtaaagtcataaagactgccttggaactcccttcccccacttacacaaggggtggaaagcactgattctgctgcattctcactctacgggatgagggtctttgtggcatttaaagtgtagcacctggagcagggaggtgagccccaagaccggtgactccagctgagcccacagttgagcctgcactggaggccgctgagggtgcagcggggtctggctgggcagcctccacttgctcagtcctcctgcctcgtagaacagccgcagcgggaactgttcatgctgattgaggctgctgagcatgggaaagacgattgtcctggagatgtgcttgtgggcgttttagcctttctgaggttgcacctgtgctgtcttggagccgtttctaagcagtgggtttagtttatgctttaagtgttgtttttcttttttggagacactgtgtctcccaggctggagtacagtggcgtgatctccacacattgtatcatccgcctcccgggttcaagcaattctcctgcctcagcctcccgagtagctgggattacaggcacttgccaccacgaccggctaatttttatatttttagtagagacggggtttcgccatgttggccaggctggtctcaaactcctgaccttaagtgatccaccctcctccgcctcccaaagtgctgggatttcaggcgtgagccaccgcgcccggcctggattaagttttaatataaacaccagtggccttactgcccgcataaataggcctccggcctctcttcaacacctgtgtgctgctcccagcgctcatctctgttctgcccccagggtaaccactgtcctgattttttttttcattctctctacctttaccatttattatttatcaccatacagagttttaattttgcctcctttgaattttttttttttttcaggcagggtcttactctgtcgcccaggctggagtgcagtggtgcgatctcggctcactgcaggctccgccctccggggttcacgccattctcctgcctcagcctcctgcgtagctgggactacaggcgaccgccacctcgcccggctaattttttgtatttttagtagagacggggtttcaccctgttagccaggatggtcttgatctcctgacctggtgttccgctcgcctcagcctccgaaagtgctgggattacaggcgtgagccaccgcgcccggcccattcctggctaatttttatatttttttgtagagacggggggcctcgctgttgccccaggctagtctcaaactcctggactcaagcgatctgccctccttggcctcccaaagtgctgggattacaagcatgggccactgcacctggcctgaaatttcaataagtgactgtgaccattaatgcaccgtgaatagcagctcaaaaggcttttctgtggtttctttcctttgcgcacatgctggtgtctgagacagtgggtgacgcagttagttcaatcattccagcgtttgtcaggcttgggttaattcaagtgtgttcatttattttgtgtacttatttatttttagagacaaggtcttgttctattgcccaagctggagtgcagtggtgtgatcgtggctcactgcagtctcaaactcctggctttaagtcatcccctcacctcagctttccaagtagctgagaccacaggtgtgcaccaccacacccagccaaagttttttttgtttgtttctttgtttttgtttgtttgtttttgttttttttgagacagagtttcgctctgtggcccaggctggagtgcagtggcaccatctcggctcactgcaacctccacctcccgggttcaagcaatcctcctacctcagcctcccgaatagctgtggttacaggcatgtgccaccaagcctggctaatttttacacttttagtagacacagagtttcataatgttggccaggttggtctcaaactcttggcctcaagtgatctacctgcctcagcctcccaaagtgctgggattacaggtgtgagccacactgcacctggcctccctcgtagcttactgtctgtgtgtgggcatatgtgagcactttccatgcctggacgttgtaagaactaacttctgaatgggctctgctcttgtcattcacagtgagatgtgcattatgccgacgattgaacttgcagttgatgtggatgttccttattctcccatagatagcatctctccttgcccaggtgttaaactgcccctcgtttccagcattgttgcaacgcttgctctgtcatatattcatgcaccataaacacagcttcccatccttttgtgttggtctatttgtccatcctgacgataccatcctctaattactattttttctttttttgagatggagtcttgctttgttgctcaggttggagtgcagtggcacaatcttggctcactgcatcctccgtctccagggttcaagcgattcttctgcctcagcctcccgagtagctgagattacaggcacatgccagcacgcccagttaatttttaaatttttagtagagatggggtttcatcatgttggccaggctggtctcgaactcttgacttcaggtgatcgccccccccccctcggcattccaaagtatttgcattacaggcgtgagccactgcacctggccctcctaattatgattgtgatttaagtgccttgatgtgttttagaattgtccctctaccggcggaggcgggcggatcacgaggtcaggagatcgagaccatcctggctaatagggtgaaaccccgtctctactaaaaaatacaaaaaattagccgggtgtggtggtgggcgcctgtagtcccagctactcgggaggctgaggctggagaatggcgtgaacccaggagacggaggttgcagtgagctgagattgcgccactgcactccagcctgggtgacagagcaagactctgtctcaaaaaaaaaaaaaaaagaattgtccctctaccttgttctgtaggaaacctgattgttcttagacatttgcctttcatttcagttcttagaagtagtttttcataaattcaaaaacaaggaaaaaaaatgaggctggttttggatgtaatggaattgtattcaaaccccagatcggtctgagagatctgctgacgtggtggcattgtttccttcctcagtccgcgtgccatctctcatttctctctcctttgatgtcattcggtagtgttttataattgttccatgatgattgttttatatccttcattagatataaaattcctctgttgcccaggctggagtgcagtgatgcaatcatggctcactgcagcctcaaactcctgcactcaagcgatcttcggcctcagcctcctgagtagctgggactgcagattcatgccaccacacccagctaattaaaaaaaatttttatagagctggggtcttgctgtgttgcccaggctggtctcaaattcctgggctcaagcgatcctcccgcctcagcctcccaaagtgctgggaggaaaggcgtgagccatggtgcccggccctgagtgtgaattttaaaaggctaatgcccaagcagtgtatcttagtaaggacaagcaggcctgaaggagctttggaacactgaagacagagcaagaaaaatatgccagtggggctcagatcaagtattttagcaatgttgattattctgttgtcattgtggagttgattgcacagccttgcccgtctacccatatgcaagaagcagcccctttgccgaaaccgccccctccctagctggccagtaaagaaacagtccaaagccacacggtcatctgctgcgtggctaccagggagcgtcgtcctggctgtgaagcttccagacagtcactgtctgctgtgtgtggttagaaggacttggacatccgtgttgtgtgcgcacaagactgtcctcgggggatgggccagagggcccaggtttgcctcggtgccataagtatcatttccatttcaggaaggaggttctgtggacccgtgagtgtcaccaccggaggcatcagggcagctccgggcagagaggcacagggcccgtgggagcctcggtctctagtgggctgtggaggccacatgggaggacagtgtcttgcaccagatccccatggccaattcaccgccactgggactggtctgagattccctgaggctggagcggaggcttcgagaacctctccagaggagtccaggcggggggtgggggcggggcagagtggaatcctgtcgtcattgcattttccacagaatctagaacctctgttgtcccacaagtaggctgatttctgatcgcacagatgggtcagagtaaaacctgtaagtgaggaatacgttctctccaaaacccagatagacctaaaaagtgttaggcttgctctggccgtgggtgttgataaatgaggtatgcttcctgcctgggctgctgcttcaaataacgaccagaaatatgaacaaagtggtggggacttgagtctagtggggtgcagcagctcgccccacctggaaagttctgcagcaggcccacgagcctgtccccgtgcctggctcttccgaaagcgcaaattaaatctctaaaatctaaaaccctctcatccccaaggccagctaccctcttgcacttcataatgtcataggaattatttttcccccatcctacacttcagtaggattttcattatcgttatgtcacagagagatccattcttttccattggttcgtttgtccatccttctgctaatactgtactggcaagattgacagctcttaaatccttgccctgtgttaggtaagccttcaccctgttcttcggaaagttttggctatttttagactctttttctctgttagatttggaaagtagttttgtcaagtcctaaaaagtctcattaagagaggatctcactctgttgcccagactggagtacagtggtgtgatcacagctcactgaaacctcctgggctcaagtgatcctgctgcctcagcctccctagtagctaggactgcaggcacatgccatcatgcctggctaattttaaaaataataaaaaaattgtagactgtgtctccttatgtcgcccagggtggtctcaaattcctggcctcaagcagtcttcctgcctcggcctcccaaaatgctgggattatgggcatgaaccacctcacagggccccaatcaagatttgtttctccattgaaatcctttactagccttaagtacttatttaactttggattttcccatagtatgtatcagcttttaaaaattaattttccaactattatgaagtagaaacataatgcaatttcttggaatcttggtaaaaatctttttctaggattatctctttgttctgttggggttttatgtgcataattcttagaaatttgcaaaaagacaagtttatgttttataattcttgtatatttcctggtggtgctggaactagtataacgttgactagaggtgaggtcatgggcgtcttcattttgtgtatcatgtttttgaggaagacagtgaacttcacattctttatgttttttaaaaaccagctttactgacatatagaacgtacagccatttaacgtgcacatttcattgttgttgttatttttttggtttttttttttttttttgagacggagtcttgctctgtcgcccaggctggagtgcagtagcgcgcactcgaagctccgcctccccagtagctgggactacaggcacccgtcaccacgcccggctaattttttgcatttttagtagagatagctaggatgatctcgacctcctgacctcgtgatccgccctcctcggcctcccaaagtgctgggatgacaggtgtgagccactgcgcccggccattggtttttacagtcacagaatcctgcaaccaagaccacagtcaacttgaggacatttccatcacctcacgaagaaacccccagacccttcagttatcactctcctattgccccggagcccctccaccaccctaagaaatgactcatctgcctctgtctctagagatttggctgttcttgacatttcgtatgttgtttctctttttttcctttttattcttttgttcttttgacatttcatatgaatggaatcctaatatgtgttcttttctgacggcttctctcactgggcatgttttcagggtcattcatgttttagcctgttagagctccattccttacatggctgagtcatatctactgtgtgggctgtaccacattttgtttatcagttgatcaactttgagttgtttccaccttttggctattgtgaatagtgctgctgtgaacatttgggtacaaatgtttctttaaatgttttcaaatttcttcagtatatatttaggagtggaatttccatttgataatactatgttaactttttttccttataatagattttattttatttatttttgtttttttttttttttttgagacagagtctcgctctgtcgcccaggctggagtgcagtggcgcgatctcggctcactgcaagctctgcctcctgggttcacgccattctcctgcctcagcctcccgagtagctgggactacaggcgcccgacaccacgcccggctaattttttgtatttttagtagagacggggtttcaccatgttagccaggatagtcttgacgtcgtgatccgcacgcctcggcctcccaaagtgctaggattacaggcatgagcctctgtgcctggccggtatcttgttttaatttgcatttccctgatgacatgatgtggagcattttttatatactcatctgccatctatatcttcacagatgagttgtcttaaggtctttagcctccacacctggctaattttttcttaattttagaaatggggtctcactgtgttgcccagggtgatgtgaaactcctgagctcaagcaatcctcccaccttggcctcccaacatgctgggattacaggcatgtgccaccacacctggcctatttgtacatgctttactctacatcgcactctcctgatgactacagctctccagaaagcctggaaaatgcatagtgtcagtcttccaacttgaaccttccccttcaatactgtgttggtattttgagtcttttacctctccatataaactttacaatcagtttgtcaatatccaccaaataacttgctgggattttgattgggattgtgttgaatctatagatcaagttgggaagaaccaatgtcttgacaatattgggtcttctatacgtggacatggaataactattcacttagttctttgatttcttctgtcagagttttacaattttcctaagatcttgtgcacattttgttagatttatacctgtatgttttattttagggcaatgctgatttaattccagtattgtctaagagcatatgatgtacgatattcttttaaacttgttaaggtgttttatgtcccaaaatacagtctaggttgaggagtgttccacgtgagcttgacaagaatgtgttttctgctgttgttgaagttgtctacagacattcatcattgggggtgctgttgaattcaactctgtgcttattgatgttccacgtgcttgatctgtttcttttcttttctttttttttttttttttttttgagacagagtctcactctgtttcccaggctggagtgcagtggcgcgatctctgctcactgcaagcgccgcctcctgggttcacgccattctcctgcctcagcctccccagcagctgggactacaggtactccccgccatgcccagctaattttttgtatttttagtagagacagggtttcaccatgttagccacgatggtctcaatctcctgacatcgtgatctgcccgcctcggcctcccgaagtgttggggttacaggcgtgagccaatgcgcctggcctaatttttatatttttagtagagacggggtttccctgtgttggccaggatggtctccatctcctgacgtcgtgatccgcccgcctcggcctccggaagtgctgggatgacgggcgtgagccaccgggcccggcctggttactgttttctgtttttgttgccctggttcgttgttccttattttgtcttccactctttttctgccttttttggttttgattgcatgttttgtgtgattccattttttctcctttcttagcaagtcaggtatgcttctctttcctttttttagtgatagccctagagatatttatttatttatttggcagggtcttgctctatcagccaggttggagtgcagtggtacaatcatggctcactgcagccttaatctcctgggctcaagccatcctgttacctcagcttcccaagtagctaggaccacagggtatatgcctccaagcccagcttatttttaaaaactttttgtggccgggcacggtggctcatgcctgtaatcccagcactctgggaggccgaggtgggtggatcacctgaggtcaggagtttgagaccagcctggccaacatggtgaaaccctgtctctacaaaaataccaaaaaaattagctgggcatgatggcgggtgcctgtaatcccagctgctcgggaggctgatgcgggagaatctcctgaacccgagaggcagaggttgcagtgaactgagattgtgtcatcgcactccagcctgggcgacagagggagagtctgtctcaaaaacaaaaaaaaacgacaacaaaaaaaactttgtaaagacagggtgtcactatgttgcccagactggtcttgaactcctggcctcaagcaatcctcccgccccagcctcccaaaatgctggcatttcaggcatgagccaccgcacccaacctagaagttttcattacatgtcttcaggctcagagtctttcctcagccacacccagtctactcatgtgtccattaaagtcattctccatttctgttacagtgcttttcaaatctctcccatggctttttcattcttaggatttccacttctcagcctgtattgcctgtttttgcatgttgtctactttttccattagagcacttcacctgttaatcatacttgttttaaattcccagtctgataattccaatgtccctgccatatatgaggggttctgctttatctcttcaagctctgtcttttgccttttagtatgccttgtcatttctttctggaaagccagacgcaatgtactgggtgaaaggcactgaagtaaatagacctttagtaacccagtggtgagatgtgggcagagggcaaggattccctgatcctttgatgacgtctcagtctattcttgagcctgtgccccgcgacactgaacttcacaagtgcttctcagttcttccttctcctctcacttggcgggacaagatgaatagaggaagatgatgggggatacatctctttccacaggtaatttagacactgatgaaaccccaacaggtgaggctctgatcaaatagttttaagggaaaggcccggtgagaaagagcagaaatatctagcctatttcaaaatcattattcttctcctctacaagactgggccccctgagattgctaactcagacttgggcccgctgtgcccccagcaattcatcagttacagctcagggtttcccatctaagtaacggttcccacagaggcttctgttcatggttgcgtgttctggtaagttatgactctctgtatccgcctctctcttcagtttgagggggcagagcttgccttgtgacatcagttctctgaaggatggaagaagagcttgttgaggtttcagtttgttcagctttttgttacaagggaataataacttccaagctccttacatgctggaccaaaaactagaagtcatttaacttttaaaaagaactgccacactgttttcttaattggttgtaccattttacattcccaccagcaatgtgtgaagattcctgtttctccatatccttgccaaaacttattttcttttttagttttttattttacccatcctagtgggtgagaagtggtatctcctttttgttttgatttgcatttctttgatgactaattactgacaatgtttatttttcttggagaaatgtctatttacatcctttccccacttttttgttgttgagactgagtcttgccctgtcacccaggctggagtgcaatggtgcgatctcggctcactgcaacctctgcctcctgggttcaagcgattctccctcctcagcctcctgagtagctgggattacaggcatccgccaccacgcccagctaatttttgtgtttttagtagagacggggtttcaccatattggctcagctggtctcaaactgctgaccttgtgatccacccacctctaaagtgctgagatgacaggtgtgagccactgtgcctggctgctaaatcagttttgtttgatcttttcaaacaactagctttggtttcattgatttttctctattgttttactgttctctatttcattaatttgcctgtaatatttattatttccttactcctaattgcttaggtttagttttattttcctattgtgtcgaggtggaccacgttaggttgttgatttgcaatctttaggataggtatttatagctattaacttcctttatataagttttggtatattatgtctttattttacatccatctcgaagtatttcccttttgatttctctttgatccattagttatggaggagtgtgttaatatccacatattagtgaatttgccaaattttctgtattagtttcagatttcatttctcattccattgtggtcagagaacatacttatttctggttttttttttggtggggggagactaactctcactctgtcagtgatgtgatcagagctcactgcaacttctgtcttcaagcagttctcgtgcctcaccctcccaagtagctgggaatccacgtgtgtgccaccatacccagcaaatttttgcatttttagtagagacagggtctcactatgttgcccaggctggtctcgaacacctgagctccagcgatccatctgccttgatctcccaaaatcctgggattacaggcgtgagccaccgcgcccggccaatattttgtatttctattgtttaaaatgtgttgaggtttcttctatggcctagcaaagggtctcttttacagaacgttcttctgcacttgagaagaatgtgtgttttgctgttgttgggttcagtgttctgcagatgtctgctatgtctaaatgacttatagtgttcaattattttatttcctcgtatttcacctagatgttctctcattaaaaagtggggtaattgatgatgctgtgctcaactaaaaaagaaaaaagaatgggtgtttatgtttcaacttgtatttttaattatccatttcttttatttttatttatttttttgagtcttgctctgtcacctaggctagagtgacattcttggctggagagcacaatcttggctcaccgcaacctccacctcctgggttcaagtgattctcctgcctcagcctcctgagtagctaggattacaggcacgcaccaccatgcccagcaaaatttgtatttttagcagagacgggggtttctccatgttggtcaggctggtctcaaactcccgacctcaggtgatctgcctgcctcggcctcccaaagtgctgggattacaggcgtgagccactgcacccggccactactttcattttcattaagtattttctaatgaaacctttcagttgtttaactttttactgtttgttggtctctttaggggttactgtattgtcaatgcgaggcttatcagatgagcttcgggtttatattcatcgctcgattccagtgagatacagaaatgctgcgtgtgtagctctattccttcctgcccctccaacttctatggcaatatgaatacatgctacatccatgaatattatatgccaaaacagtgcgttttaattagtactttaccatctgtagtcatgtccctttgcttaaatatgcctttgctccctcccaccctcctcctctgtgctgttattggcaaataggtattcttatgtgttatacatccaacagtgctttccaaacatattcatacagttgcctttaaaataatttaagaaaataaaggggaataaagggggaaaacggatacaatgttgcctagggctccaggcagacaaagacaggaattcttaagtcacattgttagaaactccctggccagcctcaggcccgtccatacaaagatcccctcaccaggcaggggattccaaggacttaccattttctgcagtagctggtggaaggcttttccgaaagtcctatgaaatgtgcatcgtttggacaaccgaggcctgctgcgttatgcaacgtttcaaatggaaaagttacttcatttgcatagcatttctctagaccctcctggtagaggaaaataagagcagtcgcagtaaaaaggcagagataagttcagactgatagtggtgccatgaagtttactaggaagtgattgtgaataagtaaaagatctaacattcgcgtcatagaggaggtgttgggacaccacagaatcttgtttgaatttatgaattgagtccagttccccagtactttcagtgtctccaatcctcctgcacacctgtgtggtttgtcttaggactcagtggtctttgaggatgtggctgtggacttcaccctggaggagtgggctttgctggattctgctcagagggacctctacagagatgtgatgctggagaccttccggaacctggcctcagtaggtgaggatggcatcattccttcccttggtttttaatgaactcatttctttctcatcagttctgttgcaagatgtgaaatgtgggaaaggactaagacagacatgttcacagccaccatggacctagaatctagtcattattccctaacagtgaaaacatgtgtgaaacagatgttatttctgtcttggtttaaaggacttgaagttcctttagtgtcattagtaggggtatagatttcactggtcatttaggatcacagagtggttccttgtttgatacctgtgacttactgtgtttgtgaaatacctaacattttgaccccttatgtctgttattgatgaggtcctcaaaatgctaaactcctcagtgtcttcctttgcttaatacgtgtcttattccttttgagatttgtttacttttttgttgcagatgatgggactcaatttaaagccaatgggtcagtttctctgcaggatatgtacgggcaagaaaaatctaaggaacagacaataccaaacttcacaggaaataattcctgtgcctacactttagaaaaaaattgtgaaggctatggcactgaagaccaccacaaaaatctgaggtgagttgcactcacaagagaaaaatccttgtatgcaattaaatatatatctaagtattgctccaaatataagcattgctccaaatttgtttattcctcagaattttaaccaaaaaaaaaaatttgtatttgactaagacattgagaatttgaaacataattgttagaagtaattacagggggccgggcgcgatggctcacgcctgtaatcccagcactttgggaggctgaggcaggcggatcacgaggtcaggagatcaagaccattctggctaacatggtgaaaacccgcctctactaaaaataccaaaaaaaaaatagccgagcgtggtggcaggcacctgtagtcccagctacctgtgaggcggaggcaggagaatgctgtgaacctgggaggcagagcttgcagtgagctgagattgcgccactgcactccagcctgggtgacagagtgagactccatctcaaaaaataaataaataaaaagaaattacaggaaaaccccatatataataaatactgcattaaaaaatatgtctcttcaaacaattcagaatagaaaaacttcacgtatactgaaatgtagttagacattatttctaatacttgttaatacatctcaacacatcattactaaacataccatacataaaaatgtctctcatttttaacagaaatcatatggtggacagattctgtacacataatgaaggtaatcaatatggagaagccatccatcaaatgccagatcttaccctgcacaagaaagtttctgctggagaaaaaccatatgaatgcaccaagtgcaggacagtcttcacgcatctttcttctcttaaaaggcacgtcaagtctcactgtggacgaaaagcacctccaggtgaggaatgtaagcaggcctgcatttgtccctcacacctacacagtcacggaagaactgacactgaggagaagccgtataagtgtcaagcatgtgggcaaactttccaacatcctcgttacctctcccaccacgtaaagactcacacagcagagaaaacctacaaatgcgagcagtgtcggatggcgtttaatgggttcgcaagcttcactagacatgtgagaactcacacaaaagacaggccatataaatgtcaggaatgtgggagagccttcatttatccctcgacatttcaaagacacatgacaacacacactggagagaagccctataaatgtcagcactgtgggaaagccttcacttacccccaggcttttcaaagacatgagaagacgcacacgggagagaagccctatgaatgcaagcagtgtgggaaaacattcagttggtctgaaaccttgcgagtccacatgaggatccacactggggacaaactctataaatgtgaacactgtgggaaggcttttacctcttccagatcattccaaggtcatttgaggacgcacactggagagaaaccttatgagtgtaaacaatgtgggaaagccttcacttggtcctcaacgtttagagaacatgtgagaattcacacgcaagagcagctctataaatgtgaacaatgtgggaaggcttttacctcttccagatcattccgaggtcatttgaggacgcacactggagagaagccttatgagtgtaaacaatgtggaaaaaccttcacttggtcctcaacgtttagagaacatgtgagaattcacacgcaagagcagctccataaatgtgaacactgtgggaaggcctttacctcttccagagcattccaaggtcatttgaggatgcacactggagagaagccttatgagtgtaaacaatgtggaaaaaccttcacttggtcctcaaccttacataatcatgtgaggatgcacactggagagaaacctcacaaatgtaaacaatgtgggatgtccttcaagtggcactcctccttccggaaccatctgaggatgcacacaggacagaaatcccacgaatgtcagtcatactcaaaagccttcagttgccaagtcattctttctaaaaccagtgagagcacacactaaagagaaattctataactttaatggggtaacctcacattaattcatgtataatgctccagaaaattcacaccaggagagaaatcttacaagtatgatattgtctttgtcaatacctcatttgtaaaacagacccattagtcgtgaatttccagctctttcaaaaataaatgtttatgtgagaaaataattctctaagtcctctttcagctatagtacctaagttttaatagttaagtgttttgtctcttaaatattttcatttcgaactgtattagacccatggtgatttgaagcatactttgaacatgacacaatttttttttttattttttttttgagacagtcttgctctgtcacccaggctggggtgcagtggtgcgatctccactcactgcaagctccgcctcccaagttcacgccattctcctgcctcagcctcccaagtagctgggactacagccacctgccaccacgcctggctaattttttgtatttttagtagagatggggtttcaccgtgttagccaggatggtctcgatctcctgacctcatggtctgcccaccttggcctcccaaagtgctgggattacaggcgtgagccaccatgcccggccaaacatgacataatttttatagtttctatatttttctgtatgggatcattacaacaataaaactttggtatttcttactggcctactgctacagatagtggatatcacttacctattttatatattgtaccttaccaaatttttttttgcaaaacctggtaaatatgcagagttctctataaagtatagtctctaatcatcttttgcaatttgtttttcctcatttctcactgggagttagacagcagcctttgaattaggaatggggacctacaaaacaagaatgaaatctgtagatggttttgttacggatatatgtgtaaggctgggaacgacatttccctgaatgtctttcctttatggcaccaagttaaaatctgctgattttctactgtgcatgaggtttggcagtcaggactagagaagtcattacccgctttgtagagccagcatactcagagacataaaggtggcacacaggcgcaccatgcacacagccttctggatcattgtactcattcctgccactgttaatgaagagtgtctctacaacagacaccagctgcctaactttcagccagacatctccatgagctctcccaacatgaagacatttagtgtggattgctacaacacctgccacgtccaccaggccactgattctgactgtcgtggtgatcatctctgaagctaactccctcctttaggtcttaccttatttttattttatttatttatttttgagacatagtcttgctgtgttgcccaagctgaagtgcagtggtgtgatctcggctcacaacctctgcgcctcccgggttcaagcgattctcctgcctcagcctcccaagtagctgagactacaggtatgcaccaccatgccccgctaacttttgtattttcagtagagacagggtttcactatgttggccgggctggtcttgaactccggacctcgtgatccacctgccttggcctcccaaagtgctgggattacaggtgtgagccaccgtgcccagcccaggtcttaccttatttttatactaaacattttcttttgttctcttagtactgcttatggttctgtgtgcagacacaaccatgacagcctatgcaccagccaaaaagcgcgcacacacacgtttgatcgtgtacagcatcgctgaatgactacttagtccatgtaagaataatcacctctcatatcaggcagactggtggagtttcctattactcagagccgagtgcaacccttcagtatatgttcaatactatgtttaattatatgctattaagaacaagacactttttgtcaaattcctctgtagtggtttcttagattttatcaaccatgttcagataaattatataataacaaatatttttactctgaagatataaatattccattgcaattatggaatatgaaatcaactttgtaattctgtcagtttaggcactatctattagcattcccagatgtgtaccagctcatgcactcttcttaaaggtcaatttttcatatacttaaaacttttgacattaacataaattcttttttttttttttgagatggagtctcactctgtcgcccaggctggagtgcagtagggtgatctcggctcactgcaagctccgcctttgggttcacgccattctcctgtctcagcctcccgagtagctgggactacaggtgcccgccaccacgcccagctaatttttttgtatttttagtagagatggggtttcaccgtgttagccaggatggtctcgatctcctgacctcgtgatccacccgcctcagcctcccaaagtgctgggattacaggcgtgagccaccacacccggcacttctaccctgacaatcttaaccaaagaactactcagggctgtttaaatggtggggagcaatagatacacaggtgtgcattgttggagttaacagtaatgactccccgtaacaataaacacgggtatgcttcagcttcatttttgcaatggtttaaacttttaggccatgtgatatgcggccatgaatttgaacatgattgtcactgatcagagggttcccatttgatgtggaccacagagcatcttacctacacaagttgtaagttgagtgttagcctagctcctgctgcagcaggtccctcccccagcctcctgcattccaacctgggtgccgggtgacatccaacatctgacggctatgatgttaaggctacaaatgctgcatttgatactgggggcacaattgccattattttataaagggggggccttcataaaagcccgggcgcggtggctcacgcctggaatcccagcgctttgggaagccgaggcgggcagatcacgaggtcaggagattgagaccccagtgaaaccctgtctctagtaaaaatacaaaaaattagccgggcgtggtggcgggcgcctgtagtcccagctactcgggaggctgaggcaggagaatggcgtgaacccgggagatggagcttgcagtgagccgagatcgcaccactgcactccagcccgggcgacagagcgagactctgtctttaaaaaataaaaaagcctttgtatggcaaggctcgccaggccaggtggctgacgcccgtaaatcccaacactttgggacgccaaggcaggcagatcacttgaggtaaggagtttgagatcagcctggccaacgtggtgaaaccccgtctttacttaaaaaatacaaaaattggctgggcgcagtgactgatgcctgtaatcccagtttctcaggaggctgaggctaggagaattgcttgaacccgggaggcggaggttgcagtgagctgagatcacaccactgcactccagcctgggcgacagaacaagactctgtctcaaaaataaataaaaataaaagcctttgtcgtatgtggctcttgcatctgaatgttaaaaattgacataaaacattaaatttttgaaatttcataaatagtagagggttcatcttatacggagaatgactgcatggcaaacgtgattgctgccaaaagctggagtttggtaagggcatagccaggcactgtgacctccacccattcctgacactgggctcttgaccccccacctgggggatgcctcactgctgatggcttgtgtttggctttctggattcactgcagtttgtaacagtggatggacagtttgaccctgcttccctcaccatctcctggtacacacaacttagtaaggtacttatccctcggaaacagacatcttttctgagctgctcactggataaatgatcaggacaaaagggatgggaggttacgtaaagccatcttgaaatttttttgataatttcatattttatcacaaccaatttttaaacctgtgtctttgagtaaatagcattaaaaggtttttctgtggaaaaactgttcctattccatacaacccttccagaagaaaggtctggataacactaaaggatgatttttttaaatgtaaaatgattgcccaatgggacacagtgactttgtaacaggaggaaatatccaaaagcatctgaggaggtggctggaggagggcagaggcgagtgttcatcttatttttcagaatctttcctgcaactttttccttcctcctgaaggaaaaccctctgtgctgctttccaaagtcccgtgagttctttttattttattttatttatttttttgagacagagtttcactcttgttgcccaggctggagtgcaatggcgtgatcctggcttactgcaacctccacctcctgggttcaagcgattctcctgccttggcgttccaggtagctgagactacaggcatgcgccaccatcctcggctaattttgtattttgagtagagatgaagtttcaccatgttggtcaggctcgtctcaacctcctgacctcaggtgatccacctgcctcagcttcccaaagtgctgggattacaggcgtgagccaatgtgcccgcccagtaagttctttgaacgcaaactgactgctgagcctagaccaccctgacacgccgtgagggagccacccagctgctattcctgccctgcagaacacccttagggccacagtggtgaaagtgatgatctgtggtcatagacaagcaaaccatgtggaactgactgcctcaggcagtccctctgaaatcggggactcaactaacctcattggacaggactgagaattctccctacagggggagtccgcgctgagtgtctgttaaccttcactgctgactaatggatgtcttgcttaggttgccctgacaattgtaaactcagtttccggcagtaccttgtgtgtcctgtgggactgtaatcaggtgtggaacctattgcaacaccgtctgagctgtggaagcttcaaattactggcaagagttctgctctaccacacacttggtaagttaggacaggtaaaaaggattcatacacaagtttaaggaggaagccaggtggctttctaaaatagacctttattttaactaagtccgaaacccctaaagggcatagctggaatcattcctgcaagctcattacccccatgctgtgacggtcttactgatgattattttgttgtaaagcaggggccaataggctgcactgcaaaaaacttagcaaaacaggcctgagtgctatcccttgaaaggcccgtttacaaggtcagctgtgtcaaaattgcacaagcaatatggtttatgcaaaacaccattcattccaggcatctggaatcttggtatttgccaagcagtgagtgcatcataaccagctggcaataaaaaaaaaccctggcagagtatctattgagcttctcaggttggtaaatagtcacacatgctgttacaattagtttcccgggcagtaaaagcatcttgtacgctgccaaccagggaggacccttggaagctcattcctggtttccccgacttcaccccatgtgcctcatccctttgctaatagttggctctgtttccttgcactgtaataagtcttagctgtaaggctgactatatgccagttcccttcagtacccctaacaaatcactgaaccactgggggtggccttgaggccccccagtacacttgacatcctgaaactgggaaattttaaaggcattttcataagagtggatggaagttttgtgttttaataatctgcaaagctcaaaaagcccattttgcttttcaaagatatgattttcataagtttgcacttccaccaaatgggctcacaggaaagagaagaaaatgtaatagctttctgtgtgcgtgtggtggggggcgttgtttctttgtagagatgaggtctcactatgttgaccaggctggtctggaactcctggactcaagtaatcctcctgcctcagcctcccaaagctctgggattaaagttgagagccaccacccctggccaatagctttgcattttgttaatgaggaaagcaaatgaaattctgtcaatttctcgatgttaagtactgcagagattaatatgacttaccatctcattgcacctcctgttcccagcttccctcccatcatacaaatgaagaaagttaagcacaaggaacacagaatcttaaccttaactcacatatcttgatgtaaacatagtaatttaacctctcagttttgaaggcctgttatctgccacctcttatacttagctctgtcgattgtttttttttttttttttccagacggagcttcgctcttgttgcccaggctggagtgcaatggcgcgatctcggctcaccgcaacgtctgcctcctgggttcaagcgattctcctgcctcagcctcctgagtagctgggattacaggcatgcccggccaactttttgtatttttagtagagacggggtttctccgtattggtcaggctggtctccaactcctgacctcaggtgatccgcccacctcggcctcccaaaaatgctgggattacaggtgtgagccactgtgcccagcctgtcaaatgtttttaaactgaaaattctacaagacaataataggctgggcgccatggctcacacctgtaaacccagcacttcgggaggccaaagtgggaggattgcttgagctcaggagttcgaggccagcctgggcaacataaggagaccttgtctctactaaaaaaattttttttaattagcaaggcatggtgctgcatgcctggagtcccagctaccggggaggctgaggcgggaggatcacttaagcccagacgtttgaggcagcagtgagctatgactgtgcccctcccactccagcctaggtgacaggatgtgacccttgtctcaatcaatcaataaatgacaagtataattagctaattttacaaatatggcatcgaattttacaaacagggctcaaaaggctacatatttcacgtaacatgacattctggaaaaggcaaagatacaggtggctaaagcagatcagtggttaggggtgaaaggttgagtacaattgggcaatccaagagtatttggggagtgatagaatgttctctgttttggtggtgtaaatatgcatttatgaaaactcatagaaatacgcttaaaatagtcttactgtatgtatattaaaaataatcaacaacaacaaaccgctttcgcttactaagagaaaatgtaaactctcctgaactttgaaaacatgcaatgtggctgggcgcggtggatcacgcctgtaatcccagcattttgggaggccgaggtgggcggatcacgtgaggtcaggagttcaaggccagcctgaccaacatggtgaaaccccgtctccacaaaaatacaaaaaattagccgggcgtggtggcaggtgcctataatcccagctactcgggaggctgaggcaggagaatcgcttgaacctgggaggcggaggttgcggtgagcccgagatagcgccactgcactccagcctgggcaacaagagcgaaactccatctcaataaataaataaataaataattaaaatgaaagaaaagaaaagaaaacgtgcaacgtttcttttaccacctttggatactcaggaagcactgaaggtctgaggaaggagggctcatgccccaaatttgcctgtactgatgttaggaaatgccctttcgggccgcgcctgctaagaacgcttctgtgagatttcagtttattcacgtccccagggtcagatctttggagatgctgtggttttgaaaacctaaaagcgcactccagttctcccaaagggggacccttcctagtggggggtcctaatcctcaagcatcagccgaggacttggcttcaggccagtttcgactctccagctcccataacaacccagttccacgacttcttcccaacaagcctcattaaagacccgcacctgcaccctctcgggagcacagttgcggctgccgggagaaagagctggaaaaagagtggttgggtccatgttccacggacacccgccgaccacggccacagccaccccacagccgcgtagccacctcggctccccaggacaaccgcaaccaccaacctcaaaggcgccccaccacgaccagcgcagacgcacccacacccaccctaggttcccccgacccactgcctctcggtccccgacatctgcaggcgcacccacacccaccctctgtcccccacaccggcagccacacccaaatgcactgcccctcggtcccccacacccacaggcgcacccacacccaccctcaccagcaggcccacccacacccaccgcccctcggtccctcacacctgcaggcgcacctgcacccaactgcccctcagtttcgcaatcaccgaggccggaggcagtggctgcacaagcaccagccataccagaccccgaagctcaccgcagcacccgcgcagtcccagcccgacaactgcgccggcgaggtccctgccccgggggcttgtgggaaacggcgacctcaaacggaggctgcacagtcgctcaaagccccgcccatcgagctcctcccggcatgcagcgcgcctcgcctcttaagcctcgtcccgtggggccccctgggattgcggacgccgctgtagcacgggcgaacttccctacttctgcgagggcggctgctgtggtttttccaggcgacagaaaaggggactcagacagggcgaggcgggagattacggacatcctgaacccctgccccgcgttgcagcagcttgcggtcatcttctgggtctggggagtggcatctgtggcggggcccccacccacgatggacgatgctctgtgtatgggggtgactgatgacagagattctggagggaccagggggccgctgtgaggctgaagagtgggggcgatgatttgtgggtgtgtccgtgtctctggatgtgtccatccttttgtccctggaacaaatgtgatttttgtcagccttgggggctactcctgcgtgtctgggaggactcgcttgttcgtggcggtccctgtacctggagtgcggtgactcccaagtgtcagtggtctcagtgcacagctgtagttttctgcgtctctgtattcctagtctgaaataaccaaaatagaaaatagggccgggtgtggcggctcacgcctgtaattccaacactttgggaggctgaggcgggcggatcacgaggtcaggagatcaagaccatcctggccaacatggtgaaaccccgtctctactaaaaatacaaaaattagctgggcatggtggcctatgcctgtaatcccagctactcaggaggctgaggcaggagaatcgcttgaagccgggaggtggaggttgcagtgagccaagatctcgccactgcactccagcctgagtgaagcagcaagacttccatctcaaaaaaaaaaaaaagaaagaaaataaaatagaggccaaggacgctggctcatgcctataatcccagcactttgggaggccaagatgggtggatccttttagctcaagagttcgagaccaccctgggcaacatggtgaaaccctgtctctatttttttttttttaataaaaagaagaccaggcatggtggctcatgcctgtaatcccagcactttgggaggccgagccagctggatcgcttgaggtcaggagttcgagaccagcctggccaacatggtgaaaccctgtctctactaaaaatacaaaattagctgggcatggtggcgtacgcctgtaatcccagctgctcaggaggctgaggcaggagaatcgctcgaagctgggaggtggaggttgcagtgagccaagatatcaccagtgcactccagcctgggtgaaacagcaagactccatctcaaaaaaaaaaaaaaaaaaaaaaaaaaaaaaagagaaaatagaggccaagcacgctggcttatgcctgtaatcccagcactttgggaggccaaggtggatggatccctttagctcaagagttcgagaccaccgtgggcaacatggcgaaaccctgtctctttttttttttttttttaataattaaaaagaagaagaccaggcatggtggctcatgcctgtaatcccagcactttgggaggccgagccagctggatcggttgaggtcaggagttcgagaccagcctggccaacgtggtgaaaccctgtctctactaaaaatacaaaattagctgggcatggtggtgtacgcctgtaatcccagctactcaggaggctgaggcaggagaatcgctcgaagccggcaggtggatgttgcagtgagccaagatctcaccagtgcactccagcctgggtgaagcagcaagactccatctcaaaaaaaaaaaaaaaagagaaaatagaggccaagcacgctggcttatgcctgtaattccagcactttgggaggccaaggtggatggatccctttagctcaagagttcgagaccaccctgggcaacatggcgaaaccctgtctcttttttttttttttttttaataattaaaaagaagaagaccaggcatggtggctcatgcctgtaatcccagcactttgggaggccgagccagctgcatcggttgaggtcaggagttcgagaccagcctggccaacgtggtgaaaccctgtctctactaaaaatacaaaattagctgggcatggtggcgtacacctgtaatcccagctactcaggaggctgaggcaggagaatcgctcgaagccggcaggtggatgttgcagtgagccaagatctcaccagtgcactccagcctgggtgaagcagcaagactccatctcaaaaaaaaaaaaaaaaagagaaaatagaggccaagcacgctggcttatgcctgtaattccagcactttgggaggccaaggtggatggatccctttagctcaagagttcgagaccaccctgggcaacatggcgaaaccctgtctcttcttttttttaataattaaaaagaagaagaccaggcatggtggctcatgcctgtaatcccagcactttgggaggctgagccagctggatcgcttgaggtcaggagtttgagaccagcttgccaacatggtgaaactccgtctctactaaagatacaaaaaattagctgggtgtggtgatgcactcctgtaatttcagctactcaggagactgaggcaagagaattgcttgaacctgggaattggaggttgcagtgagccgagactgtgccattgcactccagcctgggcaacagagtgagactttgtcgcaaaaataagtaaataggccgggtgcagtgactcacacctgtaatcccagcactttgggaggccgaagtgggcgggtcacttgaggtcaggagttcgagaccagcctggccaacatggtgaaaccccgtctctactaaaaatacaaaaattagctgggtgtggtggcgcatgcctgaagtcccagctacttgggaggctgaggcaggagaatggcttgaacccaggagacagaggttgcagtgagccaagatctcaccattgcagtccagcctgggcaacagagtgagacactgtctcaaaaaattaaatagataaatacaaatacagaaaagccagctgtggtggtgtgcacctgtagtcccagttactcaggaggctgaggcaggaaaatcacttgaacctgggaggcagagcttgcagtgagccaagatcatgccactgcactccagcctgggcaacagagtgagactcagtatcaaaaaggaaaagaaagggtgggtgtggtggctcatgcctgtaatcccagcagttttggaggccaaggcaggtggatcacctgacgtcaggagctcgagaccagcctgagcaacatggtgaaaccctgtctctactaaaaatacaaaaaaattagccagttgtggtggcacacacttgtaatcccagctactcgggaggctgaagcaggagaatcgcttgaacctaggagatagaggttgagccgggcacagtggctcacgcctgtaatcccagcactttgggaggccgaggcgggcggatcacctgaggttgggagttcgagaccagcctgaccaacatggagaaaccctgtctctactaaaaatacaaaattagctgggcatagtggcgcatgcctgtaatcccagctactcgggaggctgaggcaggagaattgcttgaacccaggaggtgaaggttgcggtgagcagaagacgtgccattgcactccagcctgggcaacaagagcaaaactccatctcaaaaaaaaaaagaaaaaaaaaaggagatagaggttgtagtgagctgagatcatgccattgcactccagcctgggtaacaagagtgaaaatcatctcaaggaaaaaaagaaaaagaaaatggaggctcagtggtcactgccgccactcagcatcagcaatgcaacgaatgcattcttggctgcaacattaaaactgccagggtggagtgaggaaacaggttacgattaaggaacaagacgcttactacagaaatcatgtaaatatgagaagagttggagataaaggggttcacaggaagaaaggagatcactaaatgcagtagcctggaatggcctgatgaaaaccagagggatggtgaaatccaaggatctctgtgtacctgaatcctaaagaggggacggtggtggggatgcttgtggaacagtctatggagtgtgctaagaggaaactaaagtcaaatgtcatgttggctttgggggctgttctagactagcagagccagaagtcagaaaaatgtattgcaatttaggtccgtaaggttaccacgtgtttgtttccgggtagtctattagaactgagaataggcagggtgcggtggctcacacctgtaatcccagcactttgggaggccaaggagagtggatcacgaggtcaggagatcgagaccatcctggctaacacagtgaaaccccgtctctactgaaaaaaaaaaaaatacaaaaaattagctgggcatggtggcaggtgcctgtagtcccagctacttgggaggctgaggcaggagaatggcgtgaacccgggaggtggagcttgcagtgagccaagatcgcaccactgcactccagctgggggagagcgtgagactccatctcaaaaaaaaaaaaaaaaaaaaaaagaactgagaataatgccttcttcgcttctacttttcaaaactcatgtgccttcatcttctcatgaacattaactcacaaccataaacagaagggagtcttggatatatagtttccaaccttattagggctgacagtacaatcaagtagaacaagctatacactaactttcatcttcatgtcaaaaggtctttcttcttaatgcagtttgtccaatttccaaccaagatcaaggacagtgaacaagaaaatagggccaggcgtggtggctcatgcctgtaattcagaatatgaccagaaaccagttgagaatgatgtctgtcaagagtcttctataaggactaatgtatctgagttacacacaagtggtatccacaaggaacaaacaaatgtggaagacacattttttttttttttgagatggagtcttgctctgtcacccaggctgaagtgcagtggcgcaatctctgctcactgcaagctccgtctcccgggttcacaccattctcctgcctcagcctccagggtagctgggactacaggcgcctgccaccacgcccagctaatttttttgtatttttagtagagacaaggtttcactgtgttagccaggatggtctcaatctcctgacctcgtgattcgcccgccttggcctcccaaagtgctgggattacaggcatgagacaccgcacccagctggaagacacatctttaaataataaagactgaaggacactgggcatggagactcatgcctgtaatcccagcactttaggaggccaaggcgagaggactgcttgagcccaggagttcgagcctagcttgggcaacatagcaagacactacctctataaaataaaacttttaattaaaaaaaaaatgactgaagggaaaggcagagtgacagcaaattccagtacctgcaatagtggactggaaaagaaataacagtctcatgatcacacactggaaacataatggcaagtgggaatgaggccaggcatggtggctcacacttgtaatcccagcactttgggagcctaaggcggggagatcccctgatgtcaggagttcgagaccagcctggtcaacatggcaaaacccccatatctactaaaaatacaaaaattagctggacatgatggcacgtgcttgtagtcccagctacttgggaggctgaggcaggagaattgcttgaaccagggaggtggaggttgctgtgagccaagatcgtgcctctgcactccagcctgggcaacacagcaagactccatctcaaaaaaaaaaaatggccaggcgctgtggctcacgcctataatcccagcactttgggaggccgaggcgggcggatcacgaggtcaggagatcaagaccatcctggctaacacggtgaaaccccgtctctactgaaaaatagaaaaaattagccgggctattcgggaggctgaggcaggagaatggcatgaacctgggaggcggagcttgcagtgagccgagatggcaccactgcactccagcctgggcagcagagcaagactctgtctcaaaaaaaaaaaaaaaaaaaaaaacaagaaagtaggaatcaaaaacgtttcatctaaactcacaccaacttgtgcatccctgggtccaaaagacatttcaatggaaatgagacagattttatataactacaattatttaaagtcctaaattacaaaatatacatagctgaaagcgtacaaaacaggatatttattaaatgtttatatcacaaacatacactagaaattaatacaaaaggaatcactattaaggctgaggcatgtaaaggcaataccatattaatcataattaagagatttctctcctactctgaatttttaggtacaaaataagtgctataccaggttttcctacatgctctacataaataacgtttctcacatttacaacaaggttttacggttgaacactctcccaggtccactgtattcgtagattcacgctccagcatgtgttctcacatgtgcttgaagcgatgcgagatacctgaaggttttcccacactgcttgcattcatacggtctctctccagtgtgcgttctcacgtgcacacgaagggacgaggaacaactgtaggctttcccacattcagtacattcgtagggtttgaccccactgtgtgatctcacatgcttttgaaagtactgagcgtggctgaaggctttcccacattgattacattcgtacggtttctctccgctgtgggttcgcacatgctctcgaagggaggagtgacagctgaaggctttcccacaatgcttacactcaaagggcttctctccagtatgcgtcctcacgtggattcgaagggaggaggaaaaactgtaggctttcccacactctttacattgatagggcttcaccccgctgtgtgttttcacatgtcttctaaagtaagtgggacatccgaaggccttcccacactgcttgcacacatagggcttctctccggtgtgcattctcatgtgtgctcgcagagaggaggggtacctgaaggctttgccgcattccttacattcatagggtttctctccactgtgcgttctcccatgttctcgaagagacgagtaacaagtgaacgcttttccgcaatgtttacactgacagggtttctctccagtgtgcgtcctcacgtgatctctaaaggaggagtaacagctgaatgattttccacaatgcttacattcatacggtttctctccagtgtgtgttctgacatgttctcgaaagtatgagggacagctgaaggctttcccacactccttacactcatagggtttctctcctgtgtgagttcttacgtgccgtgtaaggtaggagtaatacataaaggtcttcccacatactttacatgcatgggttttctgcccatgatgactattcacatgtcccctgaaagatgagggacaaatgaaagcttttccacatttctgacattcataagactttttactgctgagacttttcacgtatgtcacagatgctgtccttgagtcctggcaattacagggtttctctacagtctgcgttttcataggagggctttggcaggagaggcagctgcaggcttgcccacattccttacacggtctctgtccagtgtgagatctctgccgattctcgaaggctttgccacacttagtgcactcagagggtttagcttcggtagggtaactcttgtgcacaagaaggttcgcagtctggctcaaggtctctccgcattgatgaccttcattactttcacagagtctccccagctgacttctgttcaaaatgggaagcaagctactagtcatgaatgactataagtgattaatttattaatggtttttagtgattattttgattacattatttgccaatttcactgaatggttctattttcagcactgtctgcctggtttctatggagaacaagcttaatgctctagctgaaggctcaactgcagccataaatttcacggtgtttcttttcttctttttttgagatggagtctcgctctgtcacccaggctggagtgcagtggcgccatctcggctcactgcaagctccacctcccaggttcatgccattctcctgcctcagcctcccaagtggctgggattacaggcgcctgccaccacgcctggctaatttttttgtattttagtagagatgaggtttcaccgtgttagccaggatggtcttgatctcctgacctcgtgatccgcctgcctcggcctcccaaagtgctgggattacaggtgtgagccaccacacccagcctttttttttttttttttgagatggagtttcactcttgttgcccaggctggagtgcaatggcatgatctcagctcaccgcaacctccacctcccaggttcaagcgatactcctgcctcagcctcccaagtggctgggattacaggcgtgcaccactacacctggctaattctttttcgtatttttttttttttcagtagagatggggtttctccatgttggtcaggctggtctcgaactcccgacctcaggtgatccacctgcctcagcctcccaaagtgctgggattacaggcgtgagccactgcgcccagcccacggtgtttcttatagatgaagtttcctgatattgtttccaactgtttcagacacgtgacattgacatcacatttataaaaatactctcttaggaaaagtctcagccagggacggtgaatcacacttgtaatcccagcactttgggaggttgagatgggtggactgcttgagtccaggagtttgataccagcctgggcaacacagtgaaactccgtctctacaaaaacacaaaaattagccaggtgcagtggtgtgtgcctatagtcccagctacttgggaggatgaggtgggaggattgcttgagcccaggaggcaaaggttgcagtgagccaagatccgtgccactgcacttcagcctggttgacagagtgagacccccatctcaaaaataaataaataaataaaataaaaataaaataaaataaataaaagtaattattaaaatatatttttaaaaagagaaaataaagaaaaagaaaaaaaatgtctctgtgggtctgaaattgtgtagttggtttatactttttttttgagatggagctttgctcttgttgcccaggctggagtgcaatggtgcgatctcagctcactgcaacctccgcctcctgggttcaagcgattctccttcctcagcctcctgagtagatgggattacaggcatgagccaccacgcccagctaatgttttgtatttttagtagagatggggtttctccgtgttggccaagctggtttcgaactactaacctcaggtgatccacccgcctcggcctcccaaagtgctgggattacaggcgcgagcccctgtgcccagccgatacttttctttgaattgcaagttagtttgatgctctgcggagaggcccatccctccggttgagcgccactcacctcagatgcctctgtgggatttggtgctgatctccagtgttatcaaatctccaattttctccaaaaatagaccaggaatcacttcctgtgaactttacaatctcttcatcattggatattccattcccaaaaacgtccctctgagaacttgatccactggttctaacataaatgtaacaatctgcaacaatcaattacacaatttcttaggagaaatatgttgggataaaggaaatagaccacatacggatttcttttcatatagtaatccaaaaatgtaccgtttataaggaagaatagacatgctatcaaagtgagactctgaggacctcatctacttgagaatttggcaataataaaaagcagatgagccgggtgcagtggctcatgcctgtaatctcaaagcactgcggggccaaggtagaagaattgcttgagcccaggagttcaagacaagcctgggcaacataggaaaataaggagacctcatctctaaacaacaataaaaaatttaaattagccaggcgtggtgttgtgtgcctataatcccagctccttgggaggccaaggagggaggatcacttgagcccaggaggtcaaagctgcagtgggccatgattgcaccacggcactgcagcctgtgtgacagagtgagaccctgtctcaaaaaaagaatagtgctggatgcggtggctcacgcctgtaatccctgcactttgggaggccgaagcgggtggatcacctgaggtcaggagttcgaaaccagcctgaccaacatggttaaaccccatctccactaaaaatacaaaaaatcagccgggcatagtggcacgtgcctgtaatcccagctactcgggaggctgaggcagaagaatcacttgtacctgggaggtgggggttgcattgagccaagatcgcaccattgcactccagcctgggcaatgggcagtaagagtgaaactgtgtctcaaaaaaaaaaaaagaagagataaacgtggcaacccatttactaagaaacagaatagttccaaacagatggagactgatgtttagtaaaatattatcagaaaagcaaagtttgcacatgcacaaatgctcctcgtatacgaggaaatccagaggctttcccctgcgaaggaggacagtgcaggggggtgcaggagaagccacacagggcagctgagagaggacacacctcctcctcctcagagaagggtttgtgtttcttttttttgttttgttttgttttttgagacagagtctcacactgtcaccaagactggagtgcagtggcactttgttggctcactgcaacctccgtgtcctgggttcaagcaattctcctgcctcagcctcccgagtagctgggattacaggcacctgccaccacgcccgactactttttatatttttagtacacatggggtttcaccacgttggccaggctggtcttgaactcctgaccttaggtgaaccacccacctaggccttccaaagtgctgggattacaggcgtgagccactgcgtgcggccaggggtttgtacttctaacccacgatgccaaacggaaccttcttatccagaacccactcctcccgagggctgctgctctcctggtgctcacaggcacagggcccttacaggagtccttcctccactatgcccggctgccctcaggtgtgagcaccacccattcctggagaatcacatgatgaggaaggattgtgaagggcaacaaatgttcccctgagacaggccaacactttgacttcccagaccaccgatgatgtccgagtgtgagttttaattgcagcaaaattaccatgtcaaacgtggattactcacagtgtaacttggatttactttatcacagtgtactttgattttcaaagtacagttactctgtgtggtgaaccacaaagctgcttttgttgccccaacgtgacacagaatactctactcagacttataaaatgtgggcagccaaggactggtgatcaagaaaacctaaatatcaatcatacacaaaactttgttttcatggagaagcattttgactcccatgttccatgggtgttgggatcatgtctatctcttttccaacatatttcaatttttgagctcaaataaaaagaaaaacaaggtatcttaggccgggcgcggtggctcacgcctgtaatcccagcactttgggaggccaaggcgggcggatcacgaggtcaggagatcgagaccatcctggctaacacggtgaaaccccatctctactaaagctacaaaaaattagccaggcgtggtggtgggcacctgtagtcccagctattcaggaggctgaggcaggagaatggcatgaacccgggaggcggagcttgcagtgagccgagatcgtgccactgcactccagcttgggcgagagagcaagactccgtctcaaaaaaataaaaaaaaaaaaaaagaaaaccaaggtctctttgctctccaggacgcagtgagggaatgatgccacccttacccaaggaggcagtgagggaatgacgccatccttacccaaggaggcagtgagggaatgacgccacccttacccaaggaggcagtgagggaatgacgccacccttacccaaggaggcagtgagggaatgacgccacccttacccaaggaggcagtgagggaatgacgccacccttacccaaggaggcagtgagggaatgacgccacccttacccaaggaggcagtgagggaatgacaccacccttacccaaggaggcaaggttcctgcaggtctccagcatcacatctctgtagaggctcctctgagcatgatccagcaatgcccactcttctggggtgaagttcacagccacttcctcaaagatcacgcagtcctaaaacattccacacatcccacttcagcaaaggcaccgcctcccccatgtgcgcaggaagaggggtgaggctgacagcctggggaactgagccacacagagcttatgtccttgtgagaggtgaccaacagtatgaaaaagtgcagtacactcaatgccgtgagtaccttcccaacagggagcaaagcgcaatgacggcctctgccagagacttacaaagaattactgagaaacggcaggtatgagggtggggaaacactgaaaaatctgaaaacatcattaagctaaggctggtggctcatgcctgcaatcccagtactttgagaggctcaggtgcgaggattgcttagggccaggagttggcgaccagcctgggctgcatagtgagatcccgtctctacaaaaaaaataaaatacaataaattaaccagccatggtggtacacacctgtagtcccggctacttaggagggtgaggagggacaatcgcttgagctcgggggttcaaggctgcagtgaactatgactgtgccactgcactcctgtctgggccacagagtgagacccaatctcaaaaaaataaaataaatcaatcattcaggtaacatggaaattgacatgacttgctcaaattttattatttcttattcagctataatatcagcactttgggaggccaaggtgagaagatcgcttgaggccaggagttcaagacgagcctgggtgacagagcaaagaccctgtctcttaaaaaaaaaaattaaattaaattaaattttaaaaatacaactatgaagaaaagcaaggagattatttccttataatttaggatattggccaggtgtggtggttcacgcctgtagttccaacactttgggaggccaagacaggcagatcacttgagttcaggagttcgagatcaccctggacaacacagtgaaaccctgtctctaccaaaaaaaaaaaggctaaaagaatttaggataggccgggcgtggtggctcacgcctataatcctagcattttgggaggctaaggtgggcggatcacaaggttaagagatcaagaccatcctggccaacatggtgaaaccccatctctactaaaaatacaaaaattagctgggcgtggtggcacacgcctgtagtctcagctactcaggaggctgaggcaggagaatcacttgaacccaggaggcagaggttgcagtgagccgagatggcgccattgcactccagtctagcaacagagtgagtctccatcacaaaaaagaaaaaaaaaaaaaaaaaaagaatgtagaatactggcctgatctggagggagaagcctaccattacacatcatttcaaattggatgccaaggcttcttcgaagacatggcctggctgtcgttacacactgttcacttgaggacgtttccactgactctgtaattgtcttacaaaagttctacatgtgttcaattttataataaaatgctatcagcagctgggcttggtggctcaggcctatactcccagcactttgggagactgaggtgggaggactgtttgagcccagaagcttgggaccagcctgagcaatatggtgaaaccctgtctctacaaaaaatacaaaaattagccaggcatggtggggcacacctggagtcccagctactcaggaggctgaggtgggaggatcatttgagcccaggaggttgaggctgtagtgagccacgatgtcaccactgcactccagcgtgggtgacagagagacgccctacctcaaaaaaaaaaaaaaaaaaaaaggctgggtgaggtggctcacacctgtaatctcagcactttgggaggccaaggcgggaggatcacttgaggtcaggagttcatgagcagcctggccaacatggtgaaaccgcaccgctactaaaaatacaaaaattagccaggtgtggtggtgcatgcctgtaatcccagctacttgggaggctgaggcaggaaaatcacttaaacccagaggcagaggttgcagtgagctgagatcaagccactgcactctagcctgggtgacagagtgagactgtctcaaaaaaaaaataaaaataagtaagaacacagccaaatcaccactttcagcccgtgttaaaggacaaaggggtgagtggtggattctagaagatctagaagtttttctgtcccacaaagggtcccatgcagaaaacaggtatcagttaatgattagggtctcatgcagaaaacaggtatcagttaatgattatcctcatgataaattgttcgtcagtcccctaatcggaattgccgcttctctgtactgtgggtcgtatattacagaatgcgcatctgtctgatgcgcagatactaacaggagacggagcagggtcccccactgtcacaaactctgcaccctgcctaagtcagtgctagtttcatgaatgttttcaatccacaccttcgcccacctcacaatatggcatggggctgtgtgtgcgcctttcccctcatcctaatggaagatgcaacgtcttccgagtttgagagttttccacagcagccttctcgggctaagccatggtataacaccaggcagtggcagaaggcaaagaacacatccaagacaatgactgccctcactaaggacaagaaaaaaaaggcaaaaagcatttattcttttttttttttttgagacagggtcttgctccgtctcccaggctggagtgcagtgaaacaatctcagctcgctgcaacctccgcctccccggttcaagcgattctcctgcctcagactcccaagtagctgggattgcaggcacttgccatcacacctggctaattttgatatttttagtagagacggggtttccccatgtcaatcagggtggtcttgaattcctgaccttgtgatccgcccacctcagccactcaaagtgctaggattacaggtgtgagccaccgcgcccggctctttttttttttttttttttttccagacagggtctagctctgttgcccaggctggagtggagtggtacagcctcaaactcgtgggctcaagcgattctcccccctcagcctctcaagtggctgggaccacaggtgcgcatccccatgcccggcctcattattttacatttactaaaacctggggctgaaataggaacaataccaatgctgagctggacacagacgaggctgttcgcagctgtcaggtgacaatgttgaactgacttcagctctgtgctcctggaaaccagcaaaggtgaaaccccgtcctgctgtgctctggaattgggacagccaggaccctcccttcccatacgacttagataagattcacgcagatgacaaggccagattcagaccctccgaaatcccattctttgtcatcagaaatgattcactaggttaggtgtgcccaggctggagtgcagtggtgtgatcatggctcactgcaacctctgcctcccgagttcaagcaattctccctgcctcagccttccaagtagctgggattacaggcacacactaccacgcccggctaatttttgtattttttagtagagatgggatttcaccatgttggccaggctggtcttgaactcctgacctcaggtgatccacctgcctcagcctcccaaagtgctgggagtacaggcatgagccaccgcgccaggcctagccaactcttcagatgcctgcatacttgacggtcacagagctctccccctgcagctgtctccctgtggctacagcattagtcccgcagctcaatcatcaactgtccccatgcccctgttgcttatacccccaccccactgcaatagaacctcaagcctctggcattactctcctgcctctaatccaactaacccttctccctattgcaacagccccttctccccctcccccaatacctcgcaataatcctttttcataaaagtttccttactacgtttgggtttacacaagcttgaccacatgttcgcagcctcccgtttcttccccaaactttactcagccttctgtcctctccgcaggcccctgaactttggcccccccgagtctgagcaagcagtaagtgtggagtcccctgtcacctcccctgagctagctgaccacgaggaggtacatttactgtcaacctcctttctgcttgtcccctaaaacgttcctccaaaccttttcttgtgtatgaaagtaaagccttttcctggttgattttgagacctggcaggtttcggaggctggggcttatccctatttttctctctccttctctagccaggatttttttttttttttttttttttggtttttgtttttgagacggagtctttctctgtcgccaggctggagtgcagcggcgccatgtcggctcactgcaagctccacctcccaggttcacgccattctcctgtctcagcctccctggtagctgggattgcaggcgcccgccaccacgccgggctaatttttgtatttttagtagagacgggatttcgccatgttgtccaggctggtctggaactcctgacctcaggtgatccgcccgcctcggcctcccaaagtgctgggattacaggcgtgagccaccgcgcccggcccaggattttattatttgacaggctccaggacagggcaccacctcctccttggcagaccttcccaaactgaccaccaagcccctgacggctcctgccctctcctcccactctccccgatcccctgactgcctctactgtcccccaacacatccctcgagcccgactccctttactgtccccccaaacttccctcaagcccctgatcgcctctactgccccccttaaagtgcccctgagcccctgactgcttctgctgtcccctcgagctgcccccaaactcccgactgcagctactgtccccctaaactgccttcgagcccctgatcacctgtcccccaaaactgccccttcaaacccatgaccgcctctacggccccctcaaactgtccccgagttcctgaccgctgctattggccccctaatctgcccttgagcctgactcccttccactgaacccccaaactgccgccgagcccctgaccgtgtctgttcccgcaaactgcccctgtgccccttaaacctctactgtccacttaaattgcctcaagcccctgaccacctctgctgtccccacaagctctccccaaactcctgacctgtactgtccccagaaactacccctcgagcccctgaccgcttttgctgtcaccccagactgcccccagccctacccctcggccgctgtgaccacgtccccggggcccaggcgctcgtcgtgcgccgccccgcgcgtccctcagctttctccggctgcgaactcgggcggaagccggttcctgccgccccacctcgccctgggcccgggctcggctcccgcccggcactcaccatgtcccgcccgctcctgggctctccagggttagcgccccgcggtccagcgaccggcgcaggtgagcacgacaggacacctgagccgctcggggtaggcggggaagcgcgcaaggcagaggggaactcggcttaccgtcctcggggtctgattggacagatctcgggaagtggagactctgattggacagtgctgtcgactccgcacccctgattggagaattctccagtccgtccccctagcgcccttgattgggcagggctccgcttcggattaacgtctctgattggacagttccctaggccccgcccctgcctgtcctgattggataattctctcctcagtgacgggctcgtcgagaacacgcgtggctgaccctctagccgggcagccgcggatctgggagaactcactccagtccagggagggcgcggcgtcctcctccctgactgcacggcaactccagactcagtttcccctcggagcggcccctcgtgcggggaggagaggaagggcacggagtcccatggggcggagtcctgcgtgggggcgggacccgcgtgcgtgacgtcaccgtgctgtcccgcgtgggcgcggacgcctggggtccagagacctggagatctggagaccagacgacgaggccccaggaggccggaccccaccaggcgctccctgtgttcttaaaactctcggccgggcgcggtggttcacgccggtaatcccagcaccgtgagaggcggagaccggcggatcatcagaggtcaggagttcaagtccagcctgaccaaaatggcgaaaaccacttctctcctaaaaatacaaaaattagctgggcacggtggcgggcgcctgtaatcccagctactccggaggctgaggcaggagaatcgcttgaacccaggaggcggagattgcagtgagccaagatcaggacactgcactccagcctgggcaacaagagcgaaactgagtctcaaaaaaaaaaaaagcagccctcccacaaacagaaccacgtaaggtcatgaagagagaggtctcacatttatatgcttaataacgaaaaagactctacaaaaaccacaggcttaaacaaaaaatacttttacagggacactcagactggtgtgacccttgttactgatctttgtagacaaggataattatttctgaaaaatgatgtaatcctcatttaaaattttttttttcctttataaacctttgtcccagtctgggcaacatggcaaaaccccatatatacaaaaaatacaaaaattagctgggaataaaggagtgtgcgcctatggtcccaacgacttgataggctgaagcaggaggatcgctcgagcccgtggggattgaggctgcagtgagctgtgatctcaccattgtactccagcctgggcaacagagacccccgtctcaaaaaaatgaaaaccaaaaacaacctttgtcttcctttacctccctgaataagcacatagtttgctatgccgcgcatattcccactgcaatgaactgttaccaccgtttttagacagcctgttatttaggtcgacacagtaaaaacatgaattacgacaattatgtttgtatgtaaaatggcaagcgatatagagtttatacttctactctgtctcaagctggaaagtcttttcggagatgagcagtcgcgttccaggctttaggaattgcggctcaactgaataaaagtattcagaattttcacgtcgagttcaaatttatttaaacttctatgattattttctcaaatgagttaaaataagaattcaattaccataggaacagtacagccttttactttaagaaattctctagggccgggcgcagtggctcacgcctataatcccagcactttgggaggctgaggcaggtggatcacctgaggtcaagagttcgagaccagcctggccaacatggcaaaacccttgtctctactaaaaatataaaaattagccgggcgtggtggcacatgcctgtaatcccaactacttgggaggctgaggcaggagaatcactagagcccgggaggcggggattgcagacccaagatcgcaccactgcactccgcctgggtgacagagcgagactccatctcaaaacaaaaacaaacaaaaaaacgccatttgaacgacacgttttgtttccccccgctttattatttttaaaaagtaccatggtgtacacattgcattacaattgtttttgtggctcaatgaaaaaaataaatcctccacctctcttcatcttaataggtgacttccttactccttacagatgtaagatgatgtaagctgatgtaacaaggtctctctaaatagacagtggacttgtttccaatcttttgctactcaaagcttgtcttatgttgcaccaccatgcctggcagatttttgtattttttggtagagatggggtttcaccatgctggccaagttggtctggaactcctgacctcaagtgatccgcttgcctcagccttcatcaatggatattaatgaagcttaggatactcacattgtgtcaaagataagaggcaaggaaactacaaagaaattggaagtgataggaaacagtggaataactgtcagagaggaagcagtgggaacaaaagacaggaaagaaaaacatgcctattatcagagtccctgaagaagtaaacagtagcacagcttttcaccttacatcattaagaaacacataaataggccgggcgcggtggctcacgcctgtaatcccagcactttgggatgccaaggtgggcagatcacctgaggtccaaagtccgagaccaccctgacaaacatggagaaaccccatctctactaaaaatacaaaaatgagctggacatggtggcaaatgcctggaacccccgctaatcgggaggctgaggcaggagaatcacttgaacccaggaggtggaggttgcagtgagccgagatcatgccactgcactccagcctgggcaacaagatcaaaactctgtctcaaaaaaaaaaaaaaaaaaaggaaaagaaacacataaatactataataaatgtagcaacgtaccttgcagaagatccaaaggttgcttgtggaattgggcaagggaatctaaatttccagagttagtatgcagtggtggagagagggttgtcggaaatctaatgttaagttttaaagcagaggaaacagtgtgacttggtatttgaggtgtgtgcgcgcattttctgttttcctaccagactcttcagttatgtgcaatttcttctgttcacttagtgtttcttagggttgaaactgaacataaacaaatatgaaattcgtgttatactcacattactcaacatatcaggtaatttgtgaagacagagatgtttcctgatcaattgttctagccgactgacagccaatatctacatagaattatttcaaagtcgcagggtgcggtggctcacgtctgtaatcccagcactttgggaggccgagttgggcggatcacaaggtcaggagatcaagaccatcctggctaacatggtgaaaccccgtctctactaaaaatacaaaaaatcagctgggcgtggtggcgagtgcctgtagtcccagctactcggaaggctgaggcaggagaatggcgtgaacccaggaggcggagcttgcgttgagctgagatcacgccattgtactctatcctgggcaacagagcaaaactctgtctcaaaaaaaaaaaaaaaaaaagaattatttcaaagtcaattgagtggctgggggcagtggcttacgcctgtaatcccagcactttgggaggccgaggcaggcgggtcacgaggtcaggagttcaagagtagcctggccaagatggtgaaaccccatctctactaaaaatacaaaaattagctgggtgtggtggcgggcacctgtagtcccagctactcgggagggtgaggcaggagaatcacttgaacccgggaggtggaggctgcagtgagccgagatcacaccactgcactccagcctgggcgacagctcgagactccgtctcaaaaaaaaaaaaaaaagtaaattgaggacactgtaacactctgctcttaaacacctcccaaatgctattttagagaaaaatctgtatttttatctaaaagtccacacttcatattcgcactttagatagttaacaatcattcctttatacctagcccataatcgtatttccttcaattataccccaaatggtctttacagctggtcctccgaagatccaaccccaaaccaggtattgcatcttcttttattttatagtattatatggtcatgttgaatttttcttttgaggtgtagtctatgaatttttgtgtatgtatagcgttaacgggtgaattgcgtccccacaaatccgtaaggtgaaggcctaacccacagtacctcagaaggtatttgaagataggcctttaaagaggcaattcgattaaaatgagattaaggtgggctcaaatccaaaagactggcgtgctattcattgcagggtgttgagcagcaccctagacctcctcatccactggatgccagtcgccccaaccccatccccggttgtgacaaccaagtctgcagacattgtccagtgtcccctgggcgtaaaatttctcctcccctctttgataatcactgctttagactctatttggtcttagagtcttttctctgaagtccatcattttatccgccgtaaccctgctgtcttcacttaaggggtccaagacgtttacaggagggtgataatggtgatgatgagctgccaataataatccacacacagcactatttgacaaatgcaggtaatgttatgtattttacagacctggaaactgaggcacttaggggcttggcaacttgcctaatatcacccgagagctgattaaggcttggggccaggactgggaccccaggatgaagcccagctgagcagaaaacctctgtgcacaggatgcagcaatcaagataataaaaatcaactccgactgagaaagtatctgcctacacattcatcaggctgggaggacagacccagatggtatcagttggaaaattaacagaaaacagtatttttgccaaggacacctttttctgagccatcaatgtcttctagctcgctaaatgccttccttgcccattacaatcatacacagtgattgacattttatcagtaagaataaacttcccttttccggccggagggtctgattttcttggacacagagaatccgtctccatttccaacccaggtgcagggctctgataagcggtttccggacataacaatctacagcggtcttatcttgtggttcccaaggaaacaggtcccggctgcacttcgcagcccagacccgagggtgacccctttacaagcttgctctttgccaaatggaaaccacgcagtatttacatttcacctaaaccccacccttccctccaaatccgatgggttactcaggcctaggatcctcaggcctagggggtcaaaacgccccgcgtccccaaccaagacccctgaagtctagcggggttccactggcctccggagcctcctccctggggcgcggtgccaggacttcgccattaaacgagcccgccccctgcactttgaactctgcccccatcctttgacccaaacccccctacgccccggcatcggagtccccttgcttggcctctgccacgaagatacggggccaggtccagcagtacaaggaggagaaaccgctctcacgggaggcgctgcggccactgagggagacggccgccgcgggtcacagacggatgcttccgtttccggttccggggcggctgggagctgaaaagtgggctagtaatgagcttgggattggtggagcctcaaagataggcgggacgacctacgtcgtccaatcgctgagcaggaaaagctagtttccgccgtctgggagataattggcattgttggcagatccgcccctcgagggcaagtctcgggacagaatcgcgctgtgggcgtggcttgtactggatcctccccggggcgtggctaaaacaagaccgaggtcccgggacgaggttgggggcgtggtctttcgcgcaatcctccaacgcccaattaccctgataaacaataaacgctaaaataagtaataaatgctcatttcctccagccaacacattcctcgtgataacatactcctgcacaaagatattcccattgttgggatttttcttccttgaatgtctgttatttcttccagaaataaggtcatttttatgcatttacatgtggcttttcttattaatgagtgcgttgtgatgttcccttctggccactagatggccacgtagctcacattttcaaattcgcggatattttgttttagttgctttagacataggtgtccaatcttttggcttcactgggacacattggaataattgtcttgggccacacataaaatacaggaacactaactatagctgatgagctaaaacaagacaaaaattgcaaaataatctcataatgttttttttttctttttttttttttttttttgagacggagtctcgctctgtcgcccaggctggagtgcagtggcgcgatctcggctcactgcaagctccgcctcccgggttcaagccattctcctgcctcagcctcccgagtagctgggattacaggcgcccgccaccaagcccggctaattttttgtatttttagtagagacggggtttcaccgtgttagccaggatggtctcgatctcctgacctcgtgatccgactgcctcggcctcccaagtgctgggattacaggcgtaagccaccactcccagccaataatctcataatgttttaagaaagtttacgaatttgtgttgggtgcattcaaagccatcctgggcttcatccggcctgcaggccctgagttggagaacttagctttagagtttagacacaggaaaaatgcaggggtctttgccttccattgtgaggcatcataactaagattaggaggccatcctgacttgtccccttgtgtgacacccagcgggctccgcatcccttgcattcccatgcctgagcacctatctcttttacaaggtaagcagtcctgaaggataccagcagaccgccagatgggttacaaattcctcatatccggtactgccagcgaaagagaacaaaagtcccttattcctgaatcggcttcatcagcttccccaatctccagccaatcaacaccaaaaagcccaagaagctattagctacaaattcctgcctaaggccgggtgtggtggctcacacctgtaatcccagcactttgggaggctgaggcgggtggatccatctaaggtcggaagttcaagaccagcctgaccaacacggtgaaaccctgtctctactaaaaatacaaaacttagctgggcttggtggcacatgcctgtaatcccagctacttgggaggctgaggcaggagaatcgcttgaacccaggaggtggagttgccgtgagccgagatcgtgccattgcactccagcctgggcaacaagagtgaaactccatctcaaaaaaaaaaaaaaaaaaattcctgccttaaaaggggccagggacttcttccaggccccacatgtgcagctagagttaaggtttagctaatagtaaacttttcctcattttattttatttttttgagatggaatcccactctgttgccaacgctggagtacagtggaacaatcaagactcactgcagcctccaagtcctgggtccaagcgattctcctgcctcaaactcctaagtagctgggactaccagcacttgccaacacacctgcctaatttttgtatttttagtagagacggggtttcaccacgttggccaggctggtctcaaacacctgacctcaggtgatctgcccgcctcagcctcccaaagtgtcgggattactttgggattactgtggcgtgagccacagcgccgggccaacattttcctcattttaatagttaaaaaaaaaaaacctgaggctgaggcaggagaaatgcttgagcccgggaggcggaggttgctgtgagccgagatcgtgccactgcactccatcctgtgtgacagagtaagactctcgaaaacaaaaacaaaaacgaaaacaaaacccacccctaggtggagattttgtatgctattgatacatgcaatgtgtgttagagcaggcagatgctgagtccaaccgtaggtccacctttgcacacctgacctcaccggtattttctgactatgtacgtacagcccccaaaaaggaatttatcttaaggcactagctgctgcctctccctgtgaatagtctgctctgcctcttagagagtactttcattttgcaataaatttctttgcttactcacactttggacttgctctcaaattatttgtgcagtgaagccaagaacctgcccagcccaccagcaacagttgtagctgccggacaggttctccctgctcactgcacaaacaaaatcgattcacaaagaccgtggcattgcagtaaaaagagtttagttggcctgaggctggctatgccatgcaggaaacggagtcattactcaaaccaagctccctgaaggctctgtcgcccaggatggagtgtagtgacatgatctcagctcactgcaacctccgcctcccaagttcaggtgattctcctgcctcagcctcctgagtagctgggattagaggcacccgccaccacgcccggctaatttttgtacttttagtagagatgggtttttgccacattggccaagctggtcttgaactcctgacttcaagggatccaccagccttggcctcccaaagtgctgggattacagacgtgagccactgcacccactcaggggttttttgaagatagtttggtggtcaggaggctagggtctaggtgctgctggctagttggggatgggatcatagggatgtggaacacggccctcatgccgtgagtccacttctgggtggaggccacaggatgggccaggggtgtccatctggttgtcagaaatgcaaaagcctggccaggcgcggtggctcacacttgtaatcccagcactttgggaggccgaggcaggaggatcacttgaggccaggagttcgagagcagcctggccaacatggtaaaactccgtctccactaaaaatacaaaaaaaatagctgggcatggtcgtgcatgcctgtaatcccagctactcgggaggctgtggcaggagaatcgcttgaacccggggggcagaggttgcagtgagccgagatcacgtcactgcactccatcctgtgggcaacagagcgagactccggctcaaacaaacaaacaaacaaaaaaaccagagcgactccatcttgaataggggctgggtaaaatgaggctgagacctgctgggccacattcccaggaggtcaggcattcttactcacaggaggagataggaggttggcaggacagtatcacaggacacaggtcacgaagaccctgctgttagaacagaacatggtaaagaagccgccaaatctcaccaaaaccaagatggcgaagaaagtgacctctggttgtcctcattgctcattatatgctaattataatgtattagcatgctaagagacactctcaccagtgccatgaccgttcacaaatgccatggcaatgtccggaagttaccttatatggtctgaaaaggggaggaggctgaggcgggcggatcacctgaggtcgggagttcgagaccagcctgatcaacacggagaaaccccgtctctactaaaaatgcaaaattagccgggcgtgatggcacatgcctgtaatcccagctactcgggaggctgaggcagcagaatcacttgaacctgggaggcggaggttgcagtgagccaagatcgcaccattgcactccagcccaggcaacaagagtgaaactctatctcaaaaaaaaaaaaaaaaaaaaaaaaaaaaagacgtgtgtgtgtgcacacagaaatgtgtgcctattgtctaataaatactcataaagcatcttctatgtcccagactctgttttctgcactgggaaacacagcagtaaacatcacacatatccttctctatatcctttagattccaatagggaaggacagaaagttaaccatgttgataaatagcatgttaatagatatatcccagccgggcacggtgggtcatgcctgtaatcccagcactttgggaggccaaggagggcagatcacctaaggtcaggagttcgaaaccagcctggccaacatggtgaaacaccatctctactaaaaaaaaaaaaaaaaaaaaaatagccaggcaaggtgtcgcatgcctgtaatcccagctactcaggaggctgaaacaggagagttgcttgaactcaggaggtgcaggttgcagtgagagaagatcgtgccactgaactccagcctgggcaacagaacaagactccatccccccataaaaaaagaaaaaatatttgtgaaatgtatacacgcagttgtccctcaatgtctgcaggagattgcaagatccctgcaggtatcaaagtcagtggatgctcaagaccctgatataaaatggtgcagtaaccagacgcggtggctcacgcctatattcctagctctttgggaggccaaggtgggaggattgcttgagctcaggagtttgagaccagcttgtccaacatagtgagacctcatctctacaaaaaatacaaatattaactgggtgtggtagctggggcctgtggtactagctacttgggaggctgaggtgagaggatcacttaagcctgggaggccaaggctgcagtgagctgagatcacaccattgcctcctaccctgggggacagagtgacagcctgtctcaaaaaaataaaataaaaaggcgtggccgggtgcggtggctcatgcctgtaatcccggcactttgggaggccaaggcaggtggatcacctgaggtcaggagttcgagaccagcctggccaacatggtgaaaccccgtctccactaaaaatacaaaaatcagctgggcatggtggcaggcacctgtaatcccagctactcgggaggctgaggcaggagaatcacttgaacccaggaggcagaggttgcagtgagctgaaatcatgccgttgcacttcagcctgggcgacaagagcaagactccgtcttaaacaaaataaataaattaattaaaataaaataaaatggtgccgtatttgtgtaaaacctccacacaccctcccatatactgtagatcagttctaagttgcttataataactagtgcaacatcaacgctatgtaaatagttgttatactgtattttaaactttgcattatttttcttcttgtattgttaattttattgtttttattaaaatgctttcttcttcttttctctccattttttttttaaatgttttgttttgagacagggtcttgccctgtcacccaggctggagtgcagtggtgggatggcggttcaccgcagcctcgaactcctgggctcaagcaatcctcctgcctcagcctccagagtagctgggaccgcaggtgcagccaccacgcctggcttcaaatattttcgattctgctgaatccacgggtatggaaccagcaaatacagaattcgaggacaagaaacccgcagataacgagaatcaattatactaattgtatctagaatatataatgacgtcaatggaaaaattgcatgaccaccagagggcacacttttacacccaaaacgtcccactttgctgtttgtttttttgtgggttttgttttgttttgttttgttttgttttgttttgttttgtttgagacggagtttcgctcttgttgcccaggctggagtgcaatggtgtgatcgatctgatctcggctcaccgcagcttctgtctcccgggttcaagcaattctcctgcctcagcctcccaagtagctgggattacaggcatgcgccaccacgcctggctaattttgtattttagcagagacggggtttctccatgttggtcaggctggtctcgaactctcaacctcaggtgatccgcccgcctcggcctcctaaagtgctgggattacaggtgtgagccaccgcacccagcccaccactttgctgttctttggaaatgttcacagaaggcaaacaatgctgtttgctctgagttaagggggagaatatgcatatattaaatacgcatgtccatacacacacagagaaggataaagcaacagaaggcacaaaaatagcatgggggaagcgcggggaaagatgcgttcaggggttcttggtactattcttccaacttttctgtaagtttgaagttatatcaaagtaaaaagttgggctgggtgcagtaggtcacacctgtaatgccagtactttgggaggctggggcaggaggatcgattgagcccaggagtttgagatctgcctgggcaacatagccagaccccatctctacaaaaaaatatgaaaattagcaagtgtggcagcagtacctgcagcctcatagctcactaaagccttgacctcatgggctcaagtgatcctcctacctcagcctcctgagaagttgggactacaggcacacgccatcacacccagctaatttttctttttattcttttcttttcttttcttttttgtgagatggagtcttgctctgtcgcccaggctggagtgcagtggcgtgatcttggcttactgcaacctccgcctcccaggttcaagcagttctctgcctcagcctcctgagtagctgggattgcaggcacgtgccaccacgctcagctaatttttgtatttttagtagagacggggtttcaccatcttggccaggctggtcttgaactcctgacctcctgatccacccgcctcggcttcccaaagtattgggattacaggtgtgagccacggtgcccagccacgcctggctaatttttcaattttcttacatgttgtccaggctggtctcaaactcttggtctcaagtgatcctcctgccttggcctcccaaagtgccaggtgcaggaaccactgcgcctcgccctttcaggaatttgagaatagtctgttggcagttgaagacgggtcatccaaaacaaagttgctaacctgaatcacccagaagctctttgctttttgtatttaatcctggatgttattcttaaatttatcgtggtaaaagcattgtaattggacaatgacagggaaaattcattcatttagctccaaatgaccattgcttgcaatctgcagacaatgtatccgtttatttttcttttctggtttctaacgctattggtattctcatcataacatggttttcttacatttctattagcttgtctctttttttcactgaaattgttattgagataattgtagaatcatatgcagttctaagaaataacacagacattggccgggcacggtggctcactcctgtaatctcagcactttggggagctgaggcaggtggatcacctgaggtcaggagtttgagagcagcctggccaacatggcaaaaccctgtctctacaaaaaatacaaaaaaaaaaaaaaaattagccaggcgtggtggcgggcgcctgtaatgccagctactcaggaggctgaggcaggagaattgcttgaacctgggaggcgaagtttgcagtgagcagagatcatgccactacactccagcctggaggacagagcgagactcagtctcaaataataataataataaataataatgataaaaatacagacagatcttttcttttttttttttgaaacagagtcttgctgtacagacatcttttctatacttggcctagattcctccaatggtgacatttggaaaactaaagtacattaccacatccctgatattgacgctgttaaaatctatccatcttcttcccatggccccattttacttgtgtgtgtgtgtgtgtgtgtgtgtgtgtctgtgtgtgtgtgtgtgaagttaacctgggtaagtctgtgtatccatcacagtcaaggtacagaactttgtccgcaccacaaggatgtccccttggatccttctacaatcacacccacctccctctaacgctcccatcccccaaacccatcaggaagctccctaaaaagatgttagtctcctagggatcccccaggttctactccccagtctgctgagctagaagcccaacgctggggtcagaaatccgcatacttaataagatgcccaactgactccagggctgaagataggattggtgcaaaaattgagcccggctgggtgcagtggttcatgcctataatctcagcactttggaaggctgaggtgggaggatctcttgagcccagaaggcggaggtcgcagtgagttatgattgcaccactgcactccagcctccacaacacagcaacagagcaagatcctgtgtcaaaaaaaaaaggaagaaaagaaaaaagaaagaaggaaggaaggaaaaagaaataaaagaaagaaagaaggaaaggaaggaaggaaggaagggagggagggagggagggaggcaggcaggcaggcaggcaggcaagcaagcaagcaagcaggccagacgcgataactcacacctgtaatcccagcactttcggaggccgaggcagacggatcacctgaggtcaggagttcaagaccagcctggccaacatggtgaaacccatctctactaaaaatacaaaaattagctgggtgtggtggcgagtgcctgtaatcccagctactcagggggctgaggcaggagaatcacttgatcccaggaggcagaggttgcagtgagctgagatagtgccactgcactccagcctgggtgacaagagcgagactctgtagaaagaaagaaaggaaaagaaaagatcccaagggcccttcaaaagccattccaaagatttcagttttgcctctgagtgagtggggccataggatgagtatcagcagaggagggacgggatcttacctaactttttttttgagtctctacaaaaaatacaaaaattaggggagcatggtggtacacacctgttgttccagctacttgggcagggctgaggcaggaggactgcttgaacctgggaggttgaggctgcagtgagctatgatcgtgccactgcactccagcctgggcaacagagcaagaccctgtctcaaataagaagacagagagcgggcagcgagatggggggcagggtgggggtgtagcaaagctccgtcctctattattgcatggaatcaaaaatcaccattgcaaatccaaaaatagaacgctgagctttagtttttttttttttttttttttttttttttttagacaaggtctcgctctgtaacccaggctggagtgcagtgacacaatcttggctcactgcaacctcagcctcccagtttcaagagattgtcctgcctcagcctgttgactacctgggattacaggcatgcgcgaccatgcccggctaatttttgttttgtttcgttttgagatggagtcttgctcttgtcacccaagttggaatgcagtggcacgatctcggctcactgcaacctccgactcccgggttcaagcaattttcctgcctcagcctcccgagtagctgggattagaggtgcgcgccatcactcccggctaatttttttatttttagtagagacggggtttcgccatgttggccaggctggtctcgaactcctgacctcagatgatccgcctgcctccgcctcccaaagtgctgggattacaggcgtgagccaccgtgcccggccctaatttttatatttttagtaaaggtgggtttcaccgtgttggccaggctgatcaccatgttggccactcctgggctcaagtgatcctcctgcctcagccacccaaagtgctgggattacaggcgagagtcaccgtgcccggcctgagctttagtattgagagtagcagttcttggccgggcgcggtggctcacgcctgtaatcccagcactttgggtggctgaggcgggcggatcatgagctcaggagatctagaccatcctggctaacacggtgaaaccccgtctctactaaaaacataaaaaaattagccgagcctggtggcgggcgcctgtagtcccagctacttgggaggctgaggcaggagaatggcgtgaacccgggaggcggagcttgcagtgagccgagatcgcgccactgcactccagcctgggagacagcgagactccgtctcaaaaaaaaaaaaaaaaagagagtagcggttctcaaaccgtggttccctgagtggcggcagcagcattgtcacctgggagcttgctaggaatgcacgttttcaggccccaggcccagatttgctgcctgaaaaagtcttaggttgggggtccacaatctgagttttaacaccccccgccccaggtaattgtgatgcacactcaaatttaagaaccactgacttaaagatatgaaagtctttgggaggctgaggtgggaggatcgcttgaggccaggagttcaaggccactctgagcaacacagcgagaccccatctttgcaaaaagagaaacaaaaacagaagaggccggccgtggtggctcatgcctgtcatcccagcactttgggaggccgagacgggcggatcaggagttcgagaccagcctgaccaacatggtgaaaccctgtctctactaaaaatacaaaaattatccgggcatggtggcgcctgtctgtaatcccagctgctcaggaggctgaggcaggagaattacttgaacccgggatgcggaggttgcagtgagccaagatcgcaccactgcactccagcctgggcgacagagcgagacttcgtctgaaaacaacaacaaacagacaagaggaacattcttctgatgagggaaatttccttctttctttctttctttttttgatacggattctgtcgcccaggctggagtgcagtggcgccatctcagctcattgcaagctccgcctcctgggttcacgccattctcctgccccagcctcccgagtagctgggactacaggcgcccgccaccacacccggcttatttttttgtatttttagtagagacgggggtttcaccctgttagccgggatggccttgatctcctgacctcgtgatccgcccgcctcgatctcccaaagtgctgagattccaggcgtgagccaccacacccggcctagtgatggaaattttctaaaattggattgtggttatggttgtgcagttggacacatttgctaaaagtcattgaacaatatgctttaaatgtatgacgtcatcttatgtaaattacgtcaacgaagcgctcatataacatttgacctgtagggggtagcagagaccataagttcaattcagaacagcccctccctgccttgagagtctcaatgggatgaacccatccctttcacttaggagtcctgattggaatgaagaattgggcagctgggaatttcccctcaatagcctaaaatgccttgtttaactaactgtggccacactcagttctaaatttataccaattagctgggggagttgagtctcttgaccacggaaccaggagaagccacatcccctctccaagcccggaagagatggttctcttcttttttttttttttttttaaatggagtctcactccatcgcccaggttggagtacagtggcatgatctcggctcactgcagcctccgcctcctgggttcaagaaattctcctgtctcagcctcccgagtggctgggactacaggtgcccaccaccacgcccagctaatttttgtatttttagtagagacagggtttcaccttgttggtcaggctgggcttgaattcctgaccttaggtgatccacccgcctcagcctcccaaagtgctgggatgacaggcgtgagccaccgcgcctggccttctttttttttttttttttttgagacagagtctccctctgtcacccaggctggagtgtggtggtgcaatcttggctcactgcaacctccaccttccaagtccaagcgattctcctgcctcagcctcccaaggagcttggattactgacatgcaccaccatgcctggctcatttttgtatttttagtagagatggggtttcaccatgttggccaggctggtctcgaaattccgacctcaggtgatttgcaagcgtcagcctcccaaagtgctgggattacaggcttgagccactgcacctggcccgaggggatggttcttaaagggtaaaatgtaaactacgatccacagcttgaccttcaaaagactccaatcctttactttctttttttgttttttatttatttattttttgtagagatgggatcttgctatgttgcccagctggtctcgaactcctaggctcaagcaagcctcctgccacagcctccagagtagctgggactgagggtgtgagctaccataactggccttgatgggaaccagtgtccagaggaagtgcagggccccatcaggcccaggcatgccataggggcaaagctagcgtggaccctcgcaactgagacatccaaggaaagcagacaccaaaaaacatgcatgtgggtgggttaaagtgctccccactctggccaggcacggtggctcactcctgtaatcccagcactttgggaggctgaggcgggtggatcacttgaggtcaggagttcaagcacaggctggccaacatggtgaaaccctgtctctactaaaaatacaaaaattagccgggcatggtggcgcgcacctgtaatcccagctactcaggaggctgaggcagggcaattgcttgaacctgggagacggagactgcagtgagccgagatcacgccactgaactccagcttgggcgacagagcgagactccatcttaaaaaaaaaaaaaagttctccccactcagtcatctccttctagcaataatttacagagcccgtccaggacagacaaggaagaatgaaacaaacaagaaaatatcacagggtggtgggacgattaggaaaactcgggaaagatggagtgatttaaatcagagaagtgtctgctgggtgcgatggttcacacctgtaatcccagcactttgggaggctgaggcagggggatcacctgaggtcaggagtttgagaccagcctggccaacatggcaaaaccccatctctactaaaaaaaaaagtagactgggcgtgatggctcatgcctgtaatcccagcacttagggaggccgaggcaggcggatcatgaggtcaggagatcgagaccatcctggctaacacggtgaaaccccgtctctactaaaaatacaaaaaaaaaaaaaaattagccgggcatggtggcaggtgcctgtagtcccagctacttgggaggctgaggcaggagaatggcgtgaatccaggaggcggagcttgcagtgagccgagattgcgccactgcactccagcctgggcgacagagcgagactccatctcaaaaacaaaactaaacaaaacaaaaattagctgggcatgatagtgcgcccctgtaatctcagctactcaggaggctgaggcaggataatcacttgaacccaggaggcagaggttgcagtgagccaagatcacaccactgcgctccagcctgggcaaaagagagagaccctgggtctcaaaataaataaataaataaataaataaatacaataagagaaacatcactgagaagagatttgttaattgaattctggatgacagagggtgttcgattgaagaggggataaagaaagactcaaacacccaggagttcgagaccagcttgtgcaatatagggagaccctgtctctgcaaaaacaaacaaaaattacctgggcgtggtggcaggggactgtagttccagttacgcaggaggctgaggccagaggatcgctcgggcctggaagtttgaggctgcagttagctgtgatcaccctactgcacttagcctgtgagtctcagtccctgtctcaaaaaaaaaaaaaaaaatagaggcttgaacatgaataattattcatcagtgaccctatgttgaaccaacaaagctgccccctgattctggaccatcagaaactgtgagataataaatgttgattgtttcaacaattcgtgtaaatggcccagcaagtttaggggcaatttgttacacagcaatagctaactaatgtctctggatttcttttgagaggaaagccaggtccaggagattcaaaacccacttcttttttttttttttttttttttgaggtggagtctcactctgtcacccgggctggagtacagtggtgggagctcggctcactgcagcctccgcctcccgggttcaagtgattctcctgcctcagcctcccgagtaggtgggattacaagtgcgcgccactacacccagctagttttttcatttttagtagagacgaggttccatcatgttgactcagctggtcttgaaatcctgacctcaggtgatccgcccacctcggcctcccaaagtgctgggattacaggcgtgagccaccgtgcctggccctcaaaacccacttttggagtggatgtggatgccccttcctccaagcttgggttcatgaggaggtccagtctaatgccactacctgagcagatcctaactggatctctctatgatggcgtaagggttatgggaatacctcctggagcaagactgcctgggataaaatcctagtttacttagcaactgtgtggtcctaagtaggtcacttagcttctctgggacttaatttcctcctatgtaaaatgggatttagtggttgatgaaaacattgagttgttatagttactcatatgaaagtcgtcagaatcaggctgggtgcggtggctcacacctgtcatcccagcactttgggaggtcgaggcgggtggatcatgaggtcaagagatcgagaccatcctaacacggtgaaacccgtctctattaaaaatacaaaaattagccaggtgtggtgaagtgcacccgtagtcccagctacttgcgaggctgaggcaggagaatcgcttgaacccggcaggcggaggttgcagtgagccgagatcatgccattgcactccagcctggaagacagagcgagactccgtatgaaagaaaaaaaaaaaaaagaaagttgtcagaatcaaaatggagtgacttgtgttaaaaaaaaaaaaaaaaaaaaaaaaaaaggccgggcgcggtggctcacgcctgtaatctcaacacattgggaggccgaggcaggcggatcacaaggtcaggagatcaagaccatcctggctaacacggtgaaaccccatctctactaaaaatacaaaaaattagccgggcgtggcagcgggcacctgttgtcccagctactggggggctgaggcaggagaatggtgtgaacccgggaggcggagcttgcagtgagccgagattgtgccactgcattccagctggggcgacgaaacgagactccgtctcaaaaaaaaaaaaaaaaagtgacgccaggtgcagtggctcatgcctgtaatcctagcacttcgggcggcagagattggcagattgcctgagctcaggagttcaagaccagcctgggcaacatggtgaaatccagtctctactaaactacaaaaaaaatcagctgggcgtggtgacgggtgtctataattccagctacacaggagactgaggcatgagaattacttgaacccaggaggcagaggttgcagtgatccgagatcgcgccactgtactccagcccgggtgacaaggtgaaactctgtctaaaaacaaaaaaacaacaacaacagcaaagtgacaaatagagccagggacagctttgaatagtgcgttctcatgcatggatgcctgataacaagaaaatatcacaaaagactgcatgccgggcacggggctcacacctgtaatcccagcactttgggaggccgagacaggaggatcacttgagcctaggagtttgaggccagccggagcaacacagccagactctgcctctacaaaacaataaaaaataaaaaatagccaggcgtggtggcacatgcctgtagtcccagctactcagaaggctaaggtgggaggatgacttaagcctcgtaggttgaggcaacagtgagccatgatggggccactgcactccaacctgagcaatagcatgagaccctgtctcaaaaaaataaaagaaaaaaataaaaggctgcaaaccccaaaaatttgcatcaaacttccttttttctttttgttttttgagatggagtctcgctctgtcacccaggctagagtgcagtggcgcaatcttggctcactgcaagctccgtctgccactctcctgcctcagcctcccgagtagctgggactacaggcacccgccaccatgccggctgattttttttttttttttggagatggagtctcgctctgttgcccaggctggagtgcagtggcaggatctcggctcactgcaagctctgcctcctgggttcacgccattctcctgcctcagcctcctgagtagttgggactacaggcgcccaccaccacgcccggctaattttttttgtatttttagtagagacagggtttcaccgtgttagccaggatggtctcgatctcctgacctcgtgatccgcccacctcggcctcccaaagtgctgtgattaaaggtgtgagccaccgcgcccagccctgattttttaaatttttagtagagacggggtttcactgtgttagccaggatggtctggatctcctgacctcgtgatccgcctgcctcagcctctcaaagtgctgggattacaggcgtaaaccaccacgcctggccgcatcaaacttcccgtcacaaccttattctacaggacatcttttcaacaagaccagctttatccttgttttttgtttgtttgtttgtttgagacagggtctcactctgtcgtccaggctggagtgcagtggtgtgatctcagctcactgcaacctccgcctcctgggttcaagtgattcttgtgcttcagcctcccaagtagctaggattacaggcaggcgccagcatgcccggttaatttttgtatttttagcagagatggggtttctccatgttggccaggctgatcttgaactcctggcctcaggtgatctgcccacctcaacctcccaaagtgctgggattacacgcgtcagccaccgtgcctggcctaccgttgttattgatccttgtagcgaaggataattacctcaaaatagttacgtcatcttcctcaattctcctttagaaatctttgtcttctattacctccctcagtatgtgcatagcttacttactatagcactgcaaagccctatttccaaataaatatccttttgttttagagagcttctccttgtttgttatttaggttgacagtttcttttttgagccttgtagtgggtagaactttgtcccccaaaaatatctgttgaagtccaaaagccccctccatcccctgtacctgggaatgcgaccttatttggaaatagggtcattgcagatatgattagttatggccgaatgcagtggctcactcctgtactcccagcactttgggaggccaaggtgggtggatcacgtgaggccaggagcttgagaccagactgggcaacacgccaacactcccctcggcaaaaaaatacaaaaattagacgggcatggtggcacacacctggagtcccagcactttgggaggccaacgcaggcagaccacaagggcaacagatggagaccatcctggccaacagagtgaaaccccatctctactaaaaatacaaaaattagttgggcgtggtggtggcgggcgcctgtagtcccagctactggggaggttgaggcaggagaatcgcttgaacctgggaggcggaggttgcagcgagccgagatcacatcgctgcactccagcctggcgacagagcaagactccgagtcaaaaaaaaaaaaaagattagttaagatgaggtcacattggattaagacagcttctaaatctgttgtttttttgttgttgttgttgttgttttttgttttttttgagacagggtctcactccctcacccaggctggagtgcagtggcgccacctcggctcactgcaacctccgcctcccgggttcaagcgattctcaaggcagctcctaaatctaataattggcgttcttatcaggagagggaaatttggacacagacacagagacaaacagggaagaaagccaagcagtgatggaagcagaaattggagtgaagccaagtcacaccaaagcctgctggccgccaccagaaactggaagaggcagggaggaccctcccctggagccttcagagggagcacagtggccctccccacacctcgattctggcctccgtcactgtgcgaaaatacatttctgttgtctgaagccacctggtttgcagtcatctgttacagcagctacagaaaacaaatatcagcttctttctaccaggtggcaggaggcaaacctcatcaatcctagccacttccacaaactcactcttcctgtgacagggggttggtgtggagcctgagggtgggggtgaagctgtcctcacagggttaacaagaattctgtacagattggccgggagcggtggctcacgcctgtaatcccagcactttgggaggccgaggcgggtggatcacaaggtcaggagttcgagaccagcctggccaagatggtgaaaccccgtttctactaaaaataaaaaaaaattagccaggcgtggtggcaggcgcctgtagtcccagctacttaggaggctgaggcaggagaattccttgaacctgggaggtggaggttgcagtgagccgagattgtgccaatgcactctagcctgggtgacagagcgagactccatctcaaaaaaaaaaaaaaaaaaagaattatgtacagacatatagttataattaagcattaggctgggcctggtggctcacgcctgtaatcttagcactttgggaggccgaggcaggtggatcacctgaggtcaggagttcgagaccaccctgaccaacatggtgaaaccctgtctttactaaaaggacaaaaaattagccgggcgtggtggcgggcgcctgtaatcccagctactagggaggctgatgcaggagaattgcttgaacccgggaggtggaggttgcagtgagtcgagactgcaccactgcactccagcctgggcaaaaagagcgaaactccatctcaaaaaataaaaaattaaaattaaaatgaagcattaatctggctgcactctgacctgcttccttgtaacagaaaagcacattgcactagacactgaccatttgcaccacatagataccatctctgacgttagaagcaaaatacttctgtttaagaattgcttaagcaggccaggctcattcctgtaatgccaacaatttgggaggccctggcaggaggattgcttgagcccagctgtataagactggcttgggcaacatagccagacctcatctctacagaaaatttaaaaattagccaggcatggtggtgtacgcctgtagtcccagctactcaaaaggctgaggtgggaggatcgcttgaacccaggaggtcacagctgagtgagctatgattgcaccactgcactccaaccagagcaatagagcaagactccatctctaaaaaaacaagaacagggccaggcatggtggcctgcggctgtaatcctagcattctgggaggccgaggtgggtggatcggatcacctgaggtcaggagctggagaccagcctgcccaacatgggaaaaccccgtccctacttaaaatacaaaaattagctgggcgtggtggcgggcacctgcaatcccagctacttgagaggctgaaacaggagagtcgcttgaaaccgggagacaaaaggttgcagtaagccgagatggcgccactgcactccagcctgggtgacagagcgagactccgtctcaaaaaaaaaaaaaaaaaaaaaaagccagggatggtggctcacgcctgtaatcccagcactttgggaagctgaggcagacagatcacctgaggtcaggagttcgagaccagcctggccaacatggtgagactcccccccaccaactaaaaatacaaaaattagccgggcatggtggcaagtgcctataatcccagctactcgggaggctgaggcaggagaattgcttgaacctgggaggcagaggttgcagtgagatgagatcatgccgctacactccagcctgggggacagaatgaaactctgtctgaaacatacaaacgaacaaaaaaagttttggagtgtggcgcctgttgactggttgaagagtgcagggtgaagttctgggacgggggagggagaagctatgttctcatgctcatcctgctcctctctgggggccttcacactagctggtgtcagctgttctgctggaattcaggatctactcaagcaattctcttttttctttctttctttcccaggctggagtgcagtggcacaatcttggctcactgcaacccctgcctcccgggttcaagagattctcctgcctcaggctcctgagtagctgggattacaggcatttgccaccgtgccccgctaatttttgagtttttagtagaggtggggtttcatcatattggccagactggtctcaaactcctgacctcaggtgatccacccgcctcagcctcccgaagtgctgggattataggcatgggtcactgcgcctggccgcaattcttttttcgacacagggtcttgctctgttgcccaggctggagtgcagtggtacagtctcggttcagagcaggctcaacttcccaggctcaagtgatcctcccacctcagcctcccgagcaactgggacgacaggtgtgtgccaccgtgcctggctaattttttattttttatagaaatggggtctcactttgttgcccaggctggtcttgaagtcctaggctcaagcgatcgtcctgccttggccttccaaagtgctggcattgcagacatgaaccacggcacccagcaaggtagtttgcttgtgtaaaacaaaaactccaaagtatttggaatgcaaatgccttttgtctcaaaccttctagactttgagtttccaagtcaaccaaacaactcaaaagccaagaacaaggaggaaatattggcttccttccttcctgtctgctgtgtcatctgtctcctccctgaggggtcaagggaaattgctccctgctggctgggctggagtggccagggcacagccaaagggaaggacccagggtgaccacactccagggaattccctccaaccccactcacgggggttttaaatcagggagaaatgggccacgctggtggctcacgcctgtaatcccagcactttgggaggccaaggtgggcagatcacaaggtcaggagttcgagaccagcctgaccaacatggtgaaaccctgtctctactaaaaatacaaaaccctgtctctactaaaaatacaaaaattagctgggcatggtggcgcacacctgtaatcccagctactcaggaggctgaggcagaaggattgcttgaacctgggaggcagagggtgcagtgagccaagatcacaccactgcaccccagcctgggtgatagagcgagactccatctcggaaaaaaaaaaaaaaaaaaggcagggggaaacagaatggaccagtctctgtggctcacccctgtaatcccagcactttaggagactgaggcaggagaatcgcttgagcccaggagttcaaaaccagcctgggcaacacaggaagaccttgtccctacaaaatacaaaaatgagctgggtgtgctgggtggcaagcacctgtggtcccacctatttgggaggctgagacgggaggactgcttgagcccaggaggttgggactgcagggagccaagattgtgccaccgcactccagcctgagcaagagtgagatcctgtctcaaaaaaaaaaaaaaaaaaaaaggctcaggcctgtaatctcaacactttgggagaacgaggtgggggtggatcccctgaagtcaggagttcgagaccagcctggccaacatgatgaaaccctgtctctactaaaaatacaaaaattagccgagtgtggtggcacgtgcctgtaataccagccactcaggaggctgaggcagaagaatcgcttgaacccgggaggtggaggttgcagtgagctgaggttgcaccattgcactcctgcctgagcaacagagtgagaccccttctcaaaaaaaaaaaagagtagaaatggaatgactactgaaaatgtgcttccgatttctacatggaccctggaggaatttctctttcctaggagcctccaatcagtgctgtccactgggactttctgtgatgacagaatgttctagatcttcgctgtccagtacggtgacccccagacgccagtgacgactgagcgcctgacatgcgggcagggtgcctgaggaatggaattttaaattgtatttcattttaattaattttaacttaaatagccacatgtgcttactggataccctgtgagacaaccctgtgagtcttggataaagcaacgtgcccagctgaaagtctacaatcagagggaggggaaaaagcaaagcccatattaggaggctggaccataaataaaacacactttaattatgcagctgggtgcagtggctcacgcctgtaatcccagcactttaggaggccgagatgagtggatcacttgaggtcaggagtttgagaccatcctggccaacatggtgaaactccatctctactaaaaatacaacattagctggaggtggtgtggtggcgggcgcctgtcatccaagctactcaggaggctgaggtagaagaatcgcttgaacccaggaggcaaaggttgcagtgagccaagatcgtgccactgcactccagcctgggcgacagagcaagactctgtcacaaaaaaataataataatagccaggcgtggtggctcacacctgtaatcccagcactttgggagaccaaggcaggtggatcacaagatcaggagtttgagaccgatccggccaatatggtgaaactccatctctattaaaaatacaaaaattaggcgggtgtggtggcgggcgcctgtagtcccagctacttgggaggctgaggcaggagaatcgcttgaacctgggaggtggaggatgcagtgagacaagatcgcgccactgcactccagcctgagggacagagagagactctgtctcaaaaaaataagtaataaaaattaaaaaataataattatgggacagtggagggttcgtgggtgggaagcttttctgcaggtctttcatgacggcccctccctttgttctccatggaccagctgcaaaacccaagtcacgtgtgcacatcaccacctctgggggctacttgtcccagcattgaaaccctcagttccccgcagcgagagagcacagaacagaaaacagggaagagtttctctggctgggtttggatctgaagtcagcagacctatcgggcatttgtgtcacatggggaggtcagaggatgggaggcgtctctgtaggagaatcctgacagcattctctgcatttagaacatgcagggcttagagctatcgtgggaggctcccgccacaggagccactgagattacaagattagctgcaatccaaaccacattcggaaaaaaataaaataagaaagggagatacaggcccggtggcggcacagtggctcatgcctgtaatccatagtactttgggaggtggaggtgggaggatcacttggggtcaggagttcaagaccagccggggcaatgtactgagactcccctccccctcgccctgtgtttaaaaaaaaaaagaggaaataaagggaaatatagggaagggaagggagggttgggaggtctcttcaatgagatccttccttccttccttccttccctccctccctcccttctttttttttttttgagatggagtttcactcttgttgcccaggctagagtgcaatggcacgatcctggctgactgcaacctccacctcccgggttcaagcgattctcctgcatcagcctcccaagtagctgggattacaggcgtctgccaccacactcagctgacctttgtatttttagtagagatggggttttgccatgttggccaggctggtcatgaactcttttcttcttttgaggcagagtactctgtcgcccagggtggagtgcaatggcgacatcttggctcattgcaacctctgcctcccaggttcaagtagctgggattacagatgtgcatcaccgtgcccggctgatttttgtatttttagtagaggtagggtttcagcatgttggccaggctggtctggaactcctgacctcaagtgatctcctgcttcggcctctcaaagtgctggaattacaggcgtgagccaccacgcctggcctgatgtggtgattttttttttttttttctgagacagagtcttgctgtgtcaccctggctgaagtgcagtggcacaatctcgactcactgcaacctccgcctcccaggttcaagtgattcttctgcctaagcctccagagtagctgggactacaggtgcctatcaccatgcctggctaatttttgtattttagtagagctggggttttctttttttttttttttttttgagacagagtcttgttctgtcgcccagtctggagtgcagtggcgcaatcttggctcactgcaagctccgcctcccgggttcacgccattctcccgcctcagcctcctcagtagctgggattacaggcacccaccgccacgcccggctaatttttttgtattttttattagagatggggtttcaccgtgttagccaggatggtctcgatctcctgacctcgtgatccacccgcctcggcctcccaaagttctgggattacaggtgtgacccggccaagctggggtttcaccatgttggccaggctggtctcgaacccctgacctcagatgatccacccacctctgcctcccaaagtgctgggattacaggcgtgcaccacagcacctggcccaacgtggtgatttctaagtagggagctgagggagtaaggagccagccggtggctgtctgagagagactgtccctggcagagtgaactgctaatgccagtaccaggtcctgggccaaacagaaagaaacgggctctcactccagaactgcagcttgaccactatatatataatatatatactttatatatattatagctatatatttttttgagatggagtcttgctctgttgctcagactggagtgcagtggcacgatcatagctcactccagactcaacctcctgggcttacgccatcctcctgcctcagcctccccagtagctgagactacaggtgcatgaccaccacacttggctaatttttaaattttttgtagagacgcggtgtcactgtgttgcccaggctggtctccaactcctggcctcaagcaatcctcccacctcagccttccaaaatgctgggatcacaggtgtgagccatggtgacttggcttcatattttgaataggccaaaacaaaactccgaaatccccttactcctatccccacgaccccacacagcaggtttctctcgctctgcagcaacccacttacctctcggaaatcatcccaggcctgttcggagtgcacgcagccccgttagcctccctggctgctcctgtaaccagcccagctctgcctgagaggttccgctattccctccgtctggaatacccaccactctctcccaccccgcgcttgcatccggcaatactgtatcagcctcagggcctctgctgtcccgctttctgctctcagagcctttgtcactgggctggaagagcagttgggaaaattcggtgataaatgcatagcccggggctgggaccatcaaggggacccagtaagttggctccagaaagaggacttgaagcttcgtttgcattgcacgttatttaatattgaggaaaatgtaattagcccgtatctaagaattggggtgacagcgctaaagattgaacccacccacctcccactcctcacctccagccataagccacttccggacaaggctaaaaatgcgtaaaacaatgcaactactcgccacctatccctgcccaagttccagcctctgagcctcaagccccacgccctcctaaatatccccgcccccgctgggaccccaaattgcctatagctctgcaagtccgcccttcccggcagcgggaccgaaagggtaaagcagaggctcccggctcgctgagtgacagcatggccggcggccggggagagccgaccaatcagggagggcgtacgcgacccacgtgcgtaaacggcctcgctattggccggcgccgccagaggcctgccccccccggagcccgaacccacgtgcagctactgcgccttcattgatctgcttcgcggtccaggtggcggctgggtggggcctgggcgggacggggcggggacaaggcgggacgaggcggggcccgatgggtcaaatggcccccggtgggggaaggaggagtttcctcttggcctgaacttggctgacctccgcagcttccgcccggtgagggacgtgagttgccaggcgtgttctagggggctggggggactccaggattcccggccggggaaggggctgcaggggcgtggaggggcaggactgaggcaaggaagaagctgggtgctgcagcagggatggaggtggagagaggtcgtttcttctgtctgatgaattccgcctaatgcacctggctaactcctagtcatccttcaaaacccctttctagtgatctccctgcgctttaggaaattgtctcaaaactaaggttgagctttggcgaccttccctgggctcccccgtccctgactgcccccagcagggagtgtatgtgcactatccaccccagcctcctagggtgaggcctgggaggcaaggctcagttctttctgggtccccgcccccatgaatctgggcagctggaggcattgataagtgaggacaggacctagggaacgcatgggagaaccgcaggattgggtccctggagacttaccaaactgggaggtgcgggtggggtaacgggtgccttgcttccctggcactgccttattttctgtccctcaagacctgccgtctccttgttgttttagactctggctaaagtcttggaggctactgccttgaagatgacctctagggaccagcccagacccaagggccccccgaaaagcacttcggtgaggagggcatgtggtgggatcagccctcaagggaaacccgggcccaatgtggttctgccccttttccacctgtgacctgggctggccccgcccaggcctcgcagctgaagacaatactggtcgctgctacactcaagacaggtgccaaggagccgtgttttttaaaaaaaattaagtgtaggctggacactgtggctcacaactgtaatctcaacatttttggaggccgaggcaggaggaccacttgagcccaggagtttgaaaccagcctggacaacgtagtgagaccctgtctctgtaaaaaataaaactagaagaatcagctgggcctagtgacgtgggcctgtagttgcagctacttgggaggctgaggcagagggttggcttgagcccaaggagtttgaggctgcagtgaactatgatggtgccactgcactccatccttggtgacagtgagatcccatctaaaaaaaaatgtagcatctaatcacatatgtgataaaaacacaggaacacatcatgtatttggttgatgttttacaagcaatccccgctccctgcactttgcgtcccagagatgaccatttgtaaatttaggctctcagggctgagcagacgtttttttttgtaaaggagtcagatgagggatattttgttttgagactttatgattttattatgtttgagacggagtctcacactcacctcggctggaatgcaatggcgcaatctcagctcactgcaacctctgcctcccgggttcaagtgattctcctgcctcgcctcccgagtagctgggactacaagcacctgccaccatgaccaccaaatttttcttgtatttttagtagagactgggtttcaccatgttggccaggctggtctcgagctcctgacctcgtgatctgcctgcctcagcctcccaaagtgctggggttataggtgtgagccaccacacttggccaagagactttattttattgagtcttgctcttgttgcccaggctggagtgcagtggcgcgatctcggctcactgcaacctccacctcccaggttcaagtgattctcctgcctcagcctcccgagtagctgggattacaggtgcgcgccaccacgcccggctaatttttgtattttcagtagagacggggttttgctgagttgcccagggttgtctcaaactcctgacctcaggtgttctgctcacctcggcctcccaaagtgctgggattacaggcatgagccaccttgcccggacttttatttttaaaaatattttgtgcttctattttcatcacaagaatgtggtgaacattttagactttaggccaaagtgcaaaatggaagatgctctttactgaaataagagaggccgggcgcggtggttcatgcctgtcattccagcactttaggaggccgaggcgggtagatcatgaggtcaggaggttgagaccagcctggccaagatggtgaaaccccatctctactaaaaatacaaaaataagccaggtgtgttgccgggggcgggcgggggaggggggcgcgggcgcatgtaatcccagctactcgggaggctgaggcaggagaatcgcttgaacccgggaggcagagtttgcagtgagctgagattgtgccactgcactccagcctgggcgacagagcaagactcggtttccaaaaaaaaaaaaaaaagcaaaaaccacaattacttttgcaccaacctaatgcctatgccatgttgaggtggagaccgggggtcttgggtgttggagcattgtaagttttatgtaaccttgctttgacctttccagccttgtcctgggatctcgaactctgagagctctccgacgctgaattatcagggcattctaaatcggctcaagcagttccccaggtgagagcaattccaggggccggaggtctcacgctgggaaggagccccacctggcctctctcccgggggtcctagtgagtggtctagaggctgctggcccaagagccaggctcaggaacaggaagccatgcagatacccagcatggagaacccggcaatacccatcccagcttttgattaaacaaaattaccaacaaatattaaaattttgattttcctgttcgacatggatttgttggcattcaattttattgttgaaaaatactgcaacggctgggtatggtggctcgcacctgtaatcccagcactttgggaggcggaggcgggcggattgcttgaggtcaggagatcaagatcagcctggccaacatggtgaaaccgcgtctctacaaaaaatacaaaaatcagccaggcttggtggtgggtgcctgtaatcccaactacttgggaaactgaggcaggagaatctcttgaacccaggaggcggagggttgcagtgagccaggatcacaccattacactcaagcctaaggctacagagtgagactcggtctttaaaaaaaaaaaaaaaaaaaagtactgcatgggctgggtgcagtggcttgcacttgtaatcccagcactttgggaggcagaggcaggaagatcgcttgagcccggagttcaataccagccttggcaacatagcgagatgccatctcttaaaaaataaaaaaaatctagctgagtgtggtggtgcacacctgtagtcccagctactcaggagactgaggcaggaggatcatctgagcccaggaattggaggctgcagtgagccatgattgtaccactgcaccctagcccgggcaacagggtgagattctgtttaaaaaaaaaaaaattgaagaaagtggcggggcgcggtggctcaagcctgttgtaatcccagcactttgggaggccgaggtgggcggatcacctggagtcaggggtttgacaccagcctggccaccatggtgaaacactgtttctattaaaaatacaaaaaaatagctgggtgtggtggcaggtgtctgtaatcccagctactcgggaggtcgaggcaggaggatctcttgaacccaggaggcggaggttgcagtgacactgcactccagcctgggtgacaagagtgagactctgtctcaaaaaaaaaaaaaaaagaatatactgcattaaaatcttactgaacttcttgacactgccttaaatttggcttctggagccagtgccttccagcttcattgagaccctccctaggggttgagggtggggctcactctggggagggagtcctgaagccacaggtcttccagcctgtcctccttccccctcaggttttctcctcattttgctgcggagttggagagcatttactactcggtgagccagacccaggcagccccaaccaaggagggccccactgggacaagctgaggccctggtttcccggccctgcctcctgagtgccctagagaggttcttttccgccaagcactgtgcctcacgcctgtaatcccagcactatgggagggcgaggcaggtggatcacctgaggtcaggagttggagaccagcctggccaacatagtagagaccctgtctctactaaaaatacaaaaattagccgggcatggtggcaggtgcctgtactcccagctactcgggaggctgaggcaggagaatcgcttgagcccaggaggcagaggttgcggtgaactgagatcacactgtactgcagcccaggtaacagagcaagactctctctgaggaaaaaaaaggtagggaccatacatcagtgtagtaagaaagtaaaagagaaaacaaggtgaaaacaaaaatttaaggtgggggagtaggggccagagaggtagagcagcttgcccagggtcacacagcattcacacccggaccacctcccgatgggatctctgttttccctttgcagctgcacaagatccagcaggatgtggcagaacatcacaagcaggtgggtgaccaggagctcaggggtgcggctgtccctccatgaaaggcatgagaaagcacagaggggggccgggcacagtggctcaaacctgtaatcccagcactttgggaggccgaggagggtggatcacttgaggtcaggagttcgagaccagcctgatcaacatggtgaaaccccgtctctactaaaaataaaaaaattagccaggcgtggtggcgggcgcctgtagtcccagctacttgggaggctgaggcaggagaattgcttgaacccgggaggtggagattgcagtgaggcaagatcgtggaactgcactccagcctgggcgacagcgagactctgtctcaaaaaaaaaaaaaaaaaaaaaaggaggtgggggatggtgaagacagaggacgaggggtaggtcatgctgagccttgtgggccgtgggaaggacttgggctttgaccccaagggaggtgggagccatggaggactgctggcagaggagggacatgccctgacttggaagcccccgtgatattagtggaggccccatatcttggggagcatctcctgtcctgtctctgagctgcttccaagagagggtcagtcctgctccttccgctccctgggcccctgcgcaacctagatgaccctttgccggtcagttgctttggacagagagagcctgtgatggggcaggcacccggctgtgttcccctgcgtgtctgagtgttcaatgaggggccatatgacatgggagtgaggggagctctgcatgggagggggcgcccgggctcccatctcccagcccagggcgcctggcccaagcagaagtacgccttccagccctgcctgtcctcccgccacctggccttttctcccaggcgctggcaggattttccgcctgtgccagatgtaactggcaggggcccagggccgtgtctgcaacttagcagggcctgggaggaggggggcagcgaagggaacagggtgagggggggccaggaagcaaccaaaacatggttattcattcagcagatatttatccatcacctccttgccaaatactgttgtagaagccaggaaaatagcaaagaacgacgcagagcttcccacccttggggcgagtggagcctggtagatggagtgttaggggatgagggctgggcaaggcgggggatggaagagagcagccccaaggggattggggaggccagggtgggcgagggttgcaattcagggtggtcagggaaggcatgcgagaaggtgacatctgagcggaggcttaaaggacatcaaagaggaagtgtggctgtctgggatgggagggatatttcaggcagagggcacagcctgtgtgaaggccctgaggcaggacggtgcctgttgtgttggtcctgaaggcactacgaggaagcccgcatggctggagcagagtgagaggaggagggggggagggcaggccacgcatggccctgtgagcttcagggaggacttgggctttgaaccctgagggagggaggtgggagccatggagggcttcagacagagggcaggccctggctactgcggagaggacagagaagaaggaggagggatgagggcagaagcccgggaaccagttaggacagtccaggtgtggaatgctggttgcttagtgatgagaagtaattgaataattgtggacgtgttttgggaggaacttgaccgcagctgctgagcatcaggatacgcagggggtgagggctccagagcaaaggagccacttcggttgcagccagacccaggagggtccctgcccagcccccactgcagggggccccaggatccctggcagcccagcctggcctgtggtcctgggcagtccgcttcccccacccgctgcttccagttccgggctttcccagccgcctcgctgtgctttcaaaatcgccatcagcacagccccctcctccgacagcccgcctgccactctcccccgggagggctgctagcaggcacaagggagccacacttttcatgctgagcgcattaaagtgccggtaaattgcgcattaacgaggcggggtgaattggagagggctcccctgggatttgctgctgctgggcgggctcagctgggaaatccatcactggctgccccaggaggcatcagcctggagtccccccccccccgcggggctccgatggagggtctcccctcccggcccctccctccgccgtcctgctaaggaaacagacaggtagcctttttgtagaaaaaaacttaagagataggatcactcgccttgctttctttttttgttgttttgacggatcatgctccgtctcccaggctggagtgcagtgggaggatctcagctcactgcaacctccacctcctgggttcaagtgattctcctgcctcagcctcccaagtagctgggattacaggtgtgtgtcaccatgcctggctaacttttatgtttttagtagagacagggttttgccatgttggccaggctggtctcgaacttctgacctcaggtgatccgcccgcctcagcctctcaaagtgctgggattaccggtgtgagccatcgcacctggccaatttctttatactttgaacatggctactagacattccatatgcatgactatatttatgtattattccaattctacttgtactggatggtattgatctcgattttattctgtttactgagaaactacatttaacttcgggattgacagtggtcagatggcttgatttttgttgttgtttgttcgttttaaataaaacaccagactgggtgaggtggctcacgcctgtaatcccagcactttgggaggctgaggtgggcagatcacctgacgtcaggagttcgagaccagcctggccaacatggagaaaccccatttctactaaaaatacaaaattagctgggcatggtggcgggtgcctgtaatcccagctacttgggagcctgaggcaggagaattgctttaacccaggaggcagaggttacagtgagcagaggtggtgccattgcactccagcctgggcgacagagcaagactgtctcaaaagagaaaaaaaaattaccactgacttgtttctatcaattctccccagcaggtaaccctcagtttcttagtatctttccaaagtttaagcaaattaaaacgtcttcctcacctagggagacctaggtatgctgttttgctgcttgaagcctttttttttttttttttttttgagacaagtctcgctctgtcacccaggctggagtgcggtggcatcatctcgcatctgggctcactgcaagctccgcctcctgggttcaagccattctcctgcctcagcctcccgagtagctgggactacaggcacctgccaccatgcctggctaatttttttttttttttttgtatttttagtagagatggagtttcaccatgttagccaggatggtctcaatctcctgacctcatgatccgcccgcctcggcctcccagagtgctgggattacaggcgtgagccaccgcacccggcctgcttgaagtcatttgaagcaaagtgtggtggtggtcaggttttctttttaaaacatcccaaaaagagtagctggggccaggtgtggtggctcacacctgtaatcccagcactttgggaggccaaggcaggagaatcatcttaggtcaagagttcaagaccagcccggccaacatggtgaaaccctgtctccaccaaaaatacaaaaatcagtctgtgtagtggcacacgcctgtaatccagctacttgggaggctgaggcaggagaattgcttgaacccaggaggcggaggttgcagtgagccgagatcacatcactgcactcctgcctgggccacagcgtgagactgtctcaaaaaaaaaaaaaaaaaaaaaaaaaaaaaaaaaaaaaaagatatatgccaggtgcgataggccggatgcggtggcttaaacctgttatcccagcactttgggaggcacacgtgggaggatagtttgaggccaggaattcaagaccagcctggccaacataatgagactcccatttctacaaaaagtgtatttaaattagctgagcgtggtggtgcatacctgtaaccccagctactcaggaggctgagatgggaggatcacttgagcctgggaggttgagggtgcagtgagctgtaatcgcaccactgcactccagcctgggtgtcagagtgagatcttatctgcaaaaaagtagatgaaggctgggggtggtggcttatgcctataatcccagcactttgggaggctgaggtgggcagatcacctgaggtcaggagttggagaccagcctggccaacatggtgaaaccccatctttactaaaaatacaaaaattagctgggtgtggtggtgtgcacctgtaatcccagctactcaggaggctgaggcaggagaaccacttgaacctgggaggcggaggttgcagtgagccgagattgcaccactgcactccagcttgggtgacagagtgagactctgtctcaaaaaaacaagtagattgatataccttcttctacaggtggggataatcatgctgtaggattgcaaacccttaactgcaacaacatttaactgttttgctgccaacctccttctagataggaaacgtcttacagattgtggagagctgcagccaactccagggtttccagtctgaggaggtgagtttctgggtcttcaaggaggggaggggacaggcttgggtgaaggctcatcctcaaagctctcactgccttgttcctgccgggccaggtctcacctgctgaaccagccagccctgggacgccccagcaggtgaaggacaagaccctgcaggagtcgagctttgaggacatcatggccaccaggtcctccgactggctccggcggcctttgggggaggacaatcagccggagacccagctgttctgggacaaggagccttggttttggcacgacactctgaccgagcaactctggcggatttttgccggcgtccacgatgagaaggcaaagcccagagacagacgtgagtgtccctgagggtgagggggaaggggcagccacaggctgcgtctcaggggctgtgcagtgaaccctgctgttctctctgtccccctcctcctctccgttgtcatggtgacagagcaggcaccaggcctggtgagtaaacaacctcagctctatccagaggggtgggcttccgggcaggcggttgggctcccccaggtcagggcactggggttcctgtgggatttgtcttccttccatcctgcccctcgggtcccccgggggggacttgggtgatccaggaggctatactggagtagcccaggacccacagcccagggcttccaggaccctataccctgactctctctctgcaactctgcctggacccgcagacaggaccccaggcagctgacaagccctgtgcaagctgcccaggaatccgaggtcttctggtcctaacaggcaggtcagcaggcctgatgagacttttccattttccaggggcaggaaagcaaggcaccaggatcctgtgacccaggaacagacccatgtcctgaagatgcctccagtaatcccagcgggcaggggccgaccgactccaggcgggatggggtgggggcatcctgtgctgaggagccaatgcaagccgcttagcccctcttgtctccccactagcccccaggccacctgaggcctcctccagtccccctgagggttcccaagacaggaacacaagttggggtgtggtccaggtgagacccaggcccgagctggtagcccagcgtgaaggctgcccagggtggggtagaggaggtgggcacagatgtgcggggaggctgggggcagctgtgatctcccccgcctgcaggagcctcctggaagagcctctcggtttctacagtccatgtaagtgtctgcactgtttgcttttgggcggggtgaggggcagcgggaattccttcctgtctatacctctgttcccgacacatagaggggaacagaggtgtaagactttcttccccttttcccatcactactctgccatcctctccaacagccgctgcagaggctgggtagaaaagtgcagtgttaggccgggcgcggtggctcacgcctgtaatcccagcactttgggaggccgaggcgggcagatcacgaggtcaggagattgagaacatcctgggtaacacggtgaaaccccgtctctactaaaaatacaaaaaaaattagccaggcgtggtggtgggtgcctttagtcccagctactcgggaggctgaggcaggagaatggcgtgaacccgggaggtggaggttgcagtgagttgagatcgcgccactgcactccagcctgagtgacagcaagactccgtctcaaaaaaaaagtgcagtgttaggctcacaggatcgccgccccaacactgggctcaaggcatttggggaagactttttcatggaaggggatggggtgtagctgtgttagaactggatgcagattgtcccaaccttgtggagtgatgctgggagaacccaggtggggcaaagaaggcttttctggggaaggagcataatagctaggaccataaaggatgaataggagttcttcctcctggggcaaagcagtctaggaagaaggcagaagtatgtggagggctgtggcaaagggacaatacttgaaggaatatgagcaggacattgaggggagtctagagggtaaaacaaggcctgagagagggaccccaaaatctgaaaaagaagcccctctaggccttgatgtgtggctcccactgggcaaaggggctcacaagcaggtcagttaccccaaggcctcccctcccaagatcctgggaccctgaggactttgaagatgcatggaagaggccagatgccttgcccgggcagtcaaagagactcgccgtcccgtgcaaactggaaaagatgcggatcttggcacacggggagctcgtgctcgccacggccatcagcagcttcacgcggcacgtgttcacctgtggcagaagaggcatcaaggtgtggagcctgactggacaggtggctgaggacaggttccctgagagccacctgcctatacaggtgaggacggccttggtttccagggatgcagggcttctgggaacagggggtttgaggtttgagtctggcagagcccagatcgtggagagagggcttccagggaaaaggggcataatagctaggaacctaaaggatgaataggagttcgctctcatgaggcaaagcagtccaggcagaatgccacggggggcgacagctcacagtgactctgcccatcccagacccctggggccttcctgcgcacctgcctgctgtcctcaaacagcaggagcctgctcaccggtggctacaacctggccagcgtgagcgtgtgggacctggcggcgccctccctgcatgtgaaggagcagttgccctgtgcaggtctcaactgccaggccctggatgccaacctggatgccaacctggccttcgccagcttcaccagtggtgtggtcaggatctgggacctgcgggatcagagtgtggtcaggtgcgtttggggggtgggaaggggaagcatcctgtgccagcctcctgtggccacctctgcccaccttactgctaccacctctgcccgccttcctgccacctcctgaacctgggatatagcactctcccagccaaaaccccttgcccccttgaacttggatttgagaaagtttagaggtgcggacttgaatcttggctggactgcgttccttgcagcccagggcattttactttttgtctgcctcagtttccccacctggacacaggatgtgacagccccaaactcaaaggcttgttagagggcaaatttgttgtaaaaatataaaacagcaggccaggcctggtgcctcaaacatgtaaacccagcactttgggaggtcaagacgggacaaatgcttaagcccaggaattcgagattaacctgggtaatgaataaaacgaatttattctatttttattaaatagaataaattttatttaataaaaattaaatagaatttttatatagtctatttaaaaatatgtatatataaattggccgggcgcagtggctcacgcctgtactcccagcagttagggaggccgaggcaggcagatccacgaggtcaggagatcaagaccattctagctgacacggtgaaaccctgtctctactaaaactacaaaaaaattagccaggcgcggtggtgggtacctgtagtcccagctactcgggaggctgaggcaggagaatcccttgaacccgggaggcggagcttgcggtgagccgagatctgtgccactgcgttcccagcctgggcgacagagcaagactctgtctcaaaaaagaaaaaaaaatacacacatatataaataaatatatatataaatacataaatatatacataaatatatacataaatatatacataaatatatacatatataaaaaacagtctgggtgcggtgtctcacacctgtaatcccagcactttgggaggccgaggtgggtggatcacttgaggccaggagctcaagaccagcctggccaacatggcgaaaccccctctctactaaaaaatatgaaaattagccggcgtggtggcacatgcctgtaatcccagctaccccggaggctgaggcaggagaatcgcttgagaagcggagtttgtggtgagccaagatggtgccactgcactccagcctgggtcacagagtgagactctgactcaaaaaaaaattttacatacatacatacatacatacatacatacatacatatatgtatacacacacacatattaaatatatgtaaataggctgggcatggtggctcatgcctgtaatcccagcactttgggaagccgaggcgggcagatcacctgaggtcgggagtttgagaccaggctaacatggagataccccatctctactaaaaatacaaaattagtcaggcgtggtggcccatgcctgtaatgccagctactcgggaggctgaggcaggagaatcgcttgaacccaggaggcagaggttgcagtgagctgagatcgtgctgctgcactccagcctgggcaacaaaacgagactccatttcaaaaaaaaaaaaaatacgtatatatatatatatatatacacacacacacacacacacacacacacacatatatataatatatgtatttataacatataagatatctatcagcatatgtttgcaggaagcaatggctgacgtaaaatacagcacaccacccgcccggcactattccccttccctgcttgaagggattcctgtagacctgcctcagagctcgggtggactcagggtggaagaggcaaggggaggcctaggtgaggccaaggggaggcccaggcggacggagaagggaggctgagggctgggaggggccggcactagatcctgtgtctgttttctgccaactttgacactctgtgcaggcagagatttttgggtggtggcactgtccctttcatgcccaaatgtagtgactggtgtttccgggggcccaaacctcagagtcttgacctgattgcctcccgatgtcccttctggccagggacctcaagggttatcctgatggagtcaagagtatcgtggtcaagggctacaacatctggactgggggtccggatgcctgtctgcggtgctgggaccagaggaccatcatgaaacctctggagtaccaattcaagtctcaggtgcggaggccgggatggggtctgcttggccaggcatcctctggtcctcagattaaaaaatgaggttgaggccgggctccgtggctcacgcctataatcctagcactttgggaggccaaggtgggtggatcacctgaggtcaggagtttgagaccagcgtggccaacatagtgaaaccccatctccactaaaaatacaaaaatcagagctgggcgcagaggctcacacctgtaatcccagcacttttggaggccgaggagggcaaatcacctgaggtcgggagttcaagacgagcctgaccaacatggtgaaaccccgtctctactaaaaatacaaaattggccaggcatggtggcacatgcctataatcccagctagtcgggaggctgaggcaggagaatcgcttaaacccgggaggtggaggttgtggtgagccgagatcgtgccattgcactccaggctgcgcaataagagcgaaactctgtctcaaaaacaaatgaggttggccaggcacagtggcgtatgcctgcaatcccaccactttgggaggcagaagtgggaggaagacttgagcccaggagtttgagaccagcctgggcaacatagtgagaccctgtttctacaaaaaataaaaataaaaattagctgagcatggtggcacgtacctggggtcgcagctagttgggaggctgaggtgagagaatggcttgagcccggggaggctgaggccacagtgaactgtgatcataccagtgactgtagtccagcctgggtgacagagtgagaccctgtctcaaaaaaaaaaaaaagggggggaggcgggtgggggggggggaggatgaactctgggaaggaaaaaaggtagtggttctaagtctcactgatgctccaaacacagagatcattagaaatattctttgcaggccgggcgcagtgtctcacgcctgtaatcccagccctttgggaggccaaggcgggtggatcatttgaggtcagaagttcaagaacagcctgaccaacatggtgaaaccccgtctctactaaaaaaaaaaaaaaaaaaaaaaaaaaacagaataattagccaggcatggtggcgcatgcctgtagtcccagctactcaagaggctgaggcgggagaatcgcttaaaccccaggaggcagacgttgtcgtaagccgagatcgtaccattgtactccagcccggcaacagagcgagactccgtctcaaaataaacactcatgctgtatcaggtgcaaagtagggaagactctccattttacacaccaacaaactgaggcacagatacgaagttgcttgtcccagggctgcacagctaggaaggggtcagtcacccggcctccaggataggtccccaggctcctgcctgcttcctgggccaggctgggacctaaccaggttcctccctccccactgcccattacctagataatgagcctgtcccacagcccccaggaggactgggtgctgctgggcatggccaatggccagcagtggctgcaaagcaccagcgggagccagcggcacatggtggggcaaaaagacagcgtcatcctgagcgtcaagttctccccctttggtaagcggctggcggaagatgaggggactcccctgcagcccccagcctcccacaagaccccacctaatgccagctccccacccaaccctctaggacacctcagaacccttctgtagcagaaaccaattttggggatgctcttatagtggaatgagggagggaagggggtgggtgcctgggcccttcctccccacccgccccaccggcgcggtccgcctccgcccttcccccttcagccactggtgtccccatgagcccggggaggctgaggccacagtgaactgtgatcataccactgactgtagtccagcctgggtgacagagtgagaccctgtctcaaaaaaaaaaaaaaaaaaaaaaggtgggtggggaggatgaactctgggaaggaaaaaggtagtggttctaagtctcgctgatgctccatttctcccaggccagtggtgggcaagcgttggaatggacgacttccttggcgtctacagcatgccggcggggacaaaagtgttcgaggtactgcggtgggctgggggcaggacccgggggtggccccaaagggaccagcctgggcaacacagcaagaccctgtctccacaaaaaacttaaaaagtagccaggtgtggtggctcacggctttaatcccagcattttgggaggctgaggcaggaagatctcttaagtgtaggagttcgagaccagcctggccaacatagtgagaccccatctctacaaaaaataattagctgagccgggtgcggtggctcacgcctgtaatcccagcactttgggaggccgagacgggcagatcatgaggtcaggagatcaagaccatcctggctaacacggtgaatccctgtctctactaaaaatacaaaaaattagttgggcgtggtggtgggcgcctgtagtcccagctacttgggaggctgaggcaggagaatggcgtgagccagggaggcggagcttgcagtgagccaagattgtgccactgcactccagcctgggtgacagagactccatctaaaaaaataataataataattaaaaacacttttaaaattaaaaataataattagctgagtgtggtggtgcacacctgcggtcccagctacttgggaggctgaggcaggaagattgtgtgagtccaggaggtcgaggctgcagcaagctgagattgcaccactgcactccagcctgggcaacagagcaagaccctgtctttctttgaagagacgatgcttcatgcttgagctgacaggtggagaccaggggtgtgtgagccctaccccagctcactgcccactgccccccctccaggtgcctgagatgtctccagtcacgtgctgtgacgtctcttccaacaaccgcctcgttgtcacaggctccggggagcacgcctccgtgtaccagatcacctactgaggggcctcgctgctgtcatcccactccggctcctcttttcatccccccccttccccccccccaacaagggggacatggtggagggaagcgggaaggctcttctgtggcatcgcacgatctagtctgtggtgtagactggtcgccatcacgtgtaataaagcacccgggaaaggcagagtgtggacgcgtcctgtcctctgaagggaaaggggccttcccatcccgtccctgctcaacttgtggaaatctggaaggacttcgtccagcctggtggctctaagcctttttttttttttttttttttttttctgaggcagggtctcactttgttatgcaggctggagtgcagtggtgccatcacgactccctgcagcctctccaactcctgggctcaagccatcctcctgcctcagcctcttgagtagttgagactacatatatgtaccaccgtgctcggctagtttaatttttttgtagatgctgggtgtggtggctcacacctgtaattccagcactttgaggtcgggggtttgagactaacacagtgaaaccccatctctactaaaaatacaaaaattagctgggcatggtggcacgtgcctgtaatcccagctactaaggaggcagaggcaggagaatctcttgaacccgggaggtagaggttgcagtgagccaagatcgtgccactgtactccaacctggcaacggagcgagactctgtctcaaattaatagaaataacaaaattttgtgtagacacagggtcttgctctgttgcccaggctggtctcaaattcctgattttatgtgattctcccacctcggcctcccaaagtgctgggattacaggcgtgagccactgtgcctggtctcaaactcctgatttaagcgatcctcctaccttggcctcccaaagtgctgggattacaggcatgagccaccgtgcccagccctctgagccgtttccgtcctcgttctctgggaatctagtcacagccacagactttgctgttggggtagcagatctccacctccgccgcccggagcagctccaatctggtccgatgtttctggtgtgattccaggagcagtgtgagtggtcctgtcctagacatgtcccatttgaccagtagtctccagtagggtgattctgccccccggggactctaggcgatgtctggaggcatttctggttgtcacgacttgtggggtccccctggcatggagtgggtgggggcagggacattactcaccattctgtggtgcccaagacggccccaccccagaggatggtccagtcccgaggtccacagtgctaaggtcgaaacaaatttccaatagcttcactggtcggccttcttcccacacaagctagggctctggaaacgccacttgcccaccctcccttttccaagctatgaaggggcccagatgtcaacgggcctaggctccttaacccagagaattatcccctttcctgcggtgtctccagaaacatccaccagggcgtgccttctgttctcagcaggaaccctcccatctccttctagaatgttcccagcggcatctactccgcccaacctatgctgccttaaattttttttctagagatggagtcccactattgcccaggctggtctcaaactcctgggctcaagcaatcctgccgcctcagcctcccaaagtgttcagatgacaggtgtgagccccagcaccggtcctaacccttgctgtacgtggtagcccacctgagcttccagaacacggggctgattgccccccactctccccgctccccactgaagccttgtctgcaggcctcgttctccagaacctggctgtcttctgggtaaccaccaggccgagttccccttgcctctgagatatcgcatccgccattctcctctttccagaacagtcttctcagggctctgggggctgtttctcatcccttagtgctcagtgtacccctcccctccactgggcagggacgtttgctcagccctttgccatgcgcagggctcttagaaatccttggaatctagccaggtgcagtggctcacgcctgtaatcccagcactttgggaggccgaggtgggtggatcacctgaggttaggagtttgggaccagcctagtcaacatggagaaacattgtctctactaaaaatacaaaaattagctgggtgtggtggtgttcctgtaatcccagctactcgggaggctgagggagaagaattgcttaagcccaggaggcagaggttgcagtgagctgagatcgtaccactgtactctccagcctgggagacagagtgcgactgtctcaaaaaaatttctacccggaggcctgagtgactacctggagtagagccccgtacaccatgtgggtatgagcaaggaaaaaatgcatgaaccctgagactcggggactacttgttacgcaacagcatcttaacgatcctgcccagcgcaactcctgtgtctcagagtggctctcacataccaggcagacacctctgaatatcctgcagaaagaattctcgttacgtatgaccccatccccaggacatggttgcctcccagtaaccgtgcccaagaggaacaatgatcaccggttccccagcccgagagagaagtgcggatgtgatagatacattttatttccaccgaggtcccctgcccatcggcccccacatgcagcaggggaaggtgtgaagccgttggccagagagcagatgggatgtacggttcctaggcagggctgggaggcggctgctaggatgtctgtcctggctgctgattcccctgggagtctggacttcgggtacaggaaggggggtcatgtctcagtagaccacctcatacacggtggccttcttgtcccccgagcctgtcacgatgtatttgttatttctggagatgtcacaactcaggactgaggacgactccttggactgccaagggaagggagagagaaaagggcacagtgaggcatggtccccacagatgggtgtgtgggcaaggctggggcggagtcaggaacgggaggtcaggactcgcctacagagtgacgtgtttctttttttgagatggagttttgttcttgtcgcccaggctgaagtgcagtggtgcgatcttggctcactgcaacctccacctcccgggttcaagacactctcctgcctcagcctcccaaatagctgggattataggcgcccgcaaccacgcccggccaatgtgtgtgtgtgtgtgtgtgtgtgtgtgtgtgtgtgtgtaatttttttttttttttgtgagacagggtctaactctgttgcccaggctagagtgcaatggtgtgatctctgctcactgcaacctccgcctcccaggttcaggcaatcctcctgtctcgaactcccaagcagctgggattgcaggtgcatgccaccatgcctggctaatttttgtatttttagaagaggcagggtttcaccatgttggccaggttgggcttgaactcctgacctcaggtgatccgcctgccttggtctcccaaagtgttgagattacacgcatgagccaccgcacccggcctaatttttgtatttttagtagagactgggtttccccatgttggccaggctagtctcaaactcctgacctcaggcgatccaccgcctaggcctcccaaagtgctgggattacaagcgtgagccaccgcgcccggcagagcgacttgttttctacagacaggtgctttggagctaagtccaatgggcagaacagggcctccattccctcaataccaagagagatggaactgaagtgctgccctttctggaagctcagagtgggtgtgcaccaggcatgatgtcacacagcacagcagagggccaaggcaatggcttagaccagggatcagcaaacttcacaaagggcctggtaaacattttaggctttgcctaaagtctaaataagtccatgtcacatattctgggatttttttcttacaaccctttgaaaatataaagggttggcacggtggctcggcgcttccggaggccgaggcaggtggatcacctgaggtcaggagttccagaccagactggccaacgtggggaatccccgtctctactaaaaatacaaaacttagccaggcatggtggcgggcacatgtaatgccagttacttgggaagctgtgggaggagaatcgctttaactcaggaggtggaggctgcagtgagctgagattgcgccactgcactccaggctgggcgacagagaaggactccgtgtcaaaaaaacaaaaaaacactgtaccaaccaggacgggcatattaaaaacactgtaccaaccaggacgggcatattaaaaagacagccaataacaagtgttggtgaggatgcagagaattttaaaatttcaatcactgctgatggggatataaaatttgaaaaacaggctgggtgtggtggctcacacctgtaatcccagcactttgggaggccaaggcgggtggatcatgaggtcaggagatcaagaccatcctggctaacacggtgaaaccccgtctctactaaaaatacaaaaaattagccaggtgtggtggcgggtacctggagtcccagctactcgggaggctgaggcaggagaatggtgtgaacccaggaggcagagcttgcagtaagcagagatagtgccgctgcactccagcctgggtgacagagtgagactccatctcaaaaaaaaaaaaagaaagaaaaacagctgggcgcagtggctcacgcctgtaatcccaacactttgggaggccaaggtaggcagatcacctgaggtcaggagtttgagaccagcctagacaacatggtgaaaccccctctctactgaaaatacaaaaattagccaggcgtggtggtacatgcctgtaatcccagctactcgggaggctgtggcaggagaatcgattgaacccgggaggtggagcttgcagtgagccgagatcgcaacactgcactccagcctgggagacagagcaagattctgtctccaaaaaaaaagaagaaatgagtaagatggcaaattttatttttatttatttatttttgaggcagagcctcactctgtcgcccaggctggagtgcagtggtgcgatctcagctcactgcaagctccacctcctgggttcatgccattctcctgcctcagcctctcgagtagctgggactacaggcgcccaccaccacgcctggctaatttttttgtattttttttagtagagacgggttttcaccatattagccagggtggtctcgatctcctgacctcgtgatccgcctgcctcagcctcccaaagtgctgggattacaggcatgagcgaccgtgcccggctggcaaattttaaattttataatattatatgcatgttactgcaactaaattttagaaaaaccaacaggctacgggcagatgaggcgaggcctccggctgaaattccaacctctgctttagtacctgggcggtagggaggcttgcaggaccctgaggaggggttagggtggcggggggacctgggggacagggacaggggcaatctctctgtctgaccctggcatacccgggcacatggccctgccagagtgggggctccagaccgccgagtacctggaaaatgctggccccgtacggcgtcctccaggcgttgagcaggttgtccttcccggtgctcacaaaccaccgtccttggggaaggagagcagcagggttcaaggagggggcactaacgagagacccgggctgcagggggaggtcggggaagctgggtctgggtctggcctctccctttttttttttttttttccaagaaagggtcttgctctgtcacccaggctggagtgcagtggtacaatcatagctcactgcagcctccaccacctggactcaagcgctcctcccaagcagctgggaccacaggtgtgcaccaccacgcccagctaatatttttattttttgccgggggcagtggctaacacccgtaatccccactttgggagacagaggtggctgggtcacttgaggtcaggagtttgagaccatcctggccaacatggtgaaaccccttctctactaaaaatacaaaaatcagctgggcattgtggcaggcacctgtaactccagctacttgggaggctgaggcttgagaatcgcttgaacccaggacgcagaggttgcagtgagctgagattgcgccactgcactccagcctgggtaacgcagtcagactctgtctcaaaaaaaaaaaaaaatattttttgtagagttgggatctcactatgctgcccagactggtctcaaactcctggcctcaagcgatcctcccaccgtggtctaccaaagtgctgggattacaggtgtgagccactgtgcccagcccaagttttgtttgtttgtttgtttggtataagatatcccatgtactatttaggatatacttacactaatgaatgatttttttttaaaaagagatagggtctcactgtattgcccaggctggagggcagtgatgtcatcatagctccctacagcctcaaagtcctgggctcaagcaatcctcctgcctcagcctccctcgtacctggcactacaggtgcgacctactggctgtttaatttttttgtagagaaagtcttgctatgttgcccaggctggtcttgaactcctggtcttgggcgatccttctgccttagcctcccaagtagctgaaactacacacatcagctactgtgcctggcttaaatttcttttctttctttttttttttttttttttttttaagatagaatctcactcttgtctcccaggctggaatgcagtggcatgatcttggctcactgcgacctccacctcccgggttcaggcaattctcctgcctcaacctcccaagtagctgggattacaggcgcccaccaccacgcctggctaatttttgtacttttaatagagtcagggtttcaccatgttggccaggcttgtctcgaactcctgacctcaggtgatctgcctgccttggcctcccaaagtgttgggatgacaggcgtgagctaccacacccagccttaaatttgaatctcagataagtcatcagtaatttttaggacaggtatatcccaaatacttcattatttggtttttagtataagtatatcccacacaccatttgggatatacttgtactaacgatttgcttttgagtatataaaacttagtatataaataacattatttgttatttatctaagattcagattgaataggcaccctgggttttgttggggttttgagggcgtgccaccccgccccagaagacacaccgcaggaggcaaacttcagggacagcacgcagctctcgtggaggtgcagctggtatttctccggcttgcggacgtgcaggatctccacgttgctactctccattccgaccgccagccagtcctggttagggcagtggcccagggagaaaatctgggggtaaagagggaagagatggggtcacgagcccctctttgttttgtgttgagacagggtctcactccgtcacccaggctggagtgcagtggcacaatcatggctcactgcagccttgacctccagggctcaagagatcctcctgcctcagcaccagaagctgagactacaggcatgcaccatcacgctggataatctttttttttttttgagacagagtctcactgtgtcacccaggctggagtgcaatgttgcagtctcagctcactgcagcctctgcctcccaggttcaagggattctcctgcctcagcctccaaagtagctgggattacaggtacctgctagtacgcccgggtaatttttgtatttttagtaaagacggcgtttcaccgtattggccaggctggtctcaaactgccaacctcaagtgatctgcccgcctcggcctcccaaagtgctgggactacaggtgtgagccaccatgtcagcctacgagcccctttggatattggggggtgcccagcaccatcaggggttgcgggggtggagtccaacattctccctcttcagcacccccctagagaaaggcagctggcccaggactgggaacacagcagacaactgcatgtcgaatcattaatattaatcagaattacacagaaccctagggctgcacatccattatctgctctgagcgcacaacagcacagggaggagggagagaggagggaggagggacagagaagggaacagccaggcaaggacaatcactccccttaagcagatgatggaagctgaggcagtgtcccctcaaggtcacagagcaagactatgaaagaccaggccttggccgggctctgtggctcaggcctgtaatcccaacactgtgggaggccgaggcgggcggatcatctgaggtcagaagttcatgaccagcctggccaacatggcgaaaacccatctctactaaaaatgcaaaaattagctgggcgtggctgcaggcacctgtaatcccagctactcgggaggctgaggcaggagaatcgcttgaacttgggaggtggaggttgcagtgacctgagattgcaccactgcactccagcctgggtgacagagcaagactctgtctcagaaacaaaaaacaaaaaaaataagacagaccaggcctaggagacagaacttctcactcttagcttggaatgttcctttttgagacagacagggtcttgctctgtcgcccaggctggagtgcagtggtgcaatcatgacccactgcagcctcaacctcctcccatgctcaagtgatcctcccgcctcagcctcacaagtagcttggattacaagcatgtgccaccacacctggctaattttgtatttttggtagagatggagtttctccatgttggtcaggctggtctcgaactcctgacctcaagtgatccacccacctcggcctcccaaagtgctgagattacaggcgtgagccactgcacccggcctcggtttgatttttaaaagattcagggtcctccacctcattttaagcacaaacaggaatcaggctctgttccaccccaaacctcttggagtctcactaacaagatgcctgtggaaataaccacacatttgcagaagagaagactggagggcttcaaatgtcctctcctggccatacagaagtgtttctgtgtaaagacgcattgggggacacccagtgagctaggagatattcaccatgggatccctagaaatgttcttagcccacctaagcttcggggccacgggatggagagctgtgtccacctgcactcctgaaagagaagagcaggttggacataaagagcttgggagggcaagcgcggtggctcaggcctgtaattcccacactgggaagccgaggcaggtggatcacttgaggccaggaatccaagaccaacctggacaacacagtgaaaccctgtctctaccgacaaatacaaaaattagccgagcatggtggtgcgttcctgtagtcccagctactcaggtggctgaggcacaagaatcatttgaacctgggaggcgcaggttgcagggagctgagatcacaacacagcaactctgtctcaaaaaaaaaaaaaaaaaaagaggagcttcggagttaggagttagctcctcttaggtttcaaggaggaggggcaaatgagatgggtcttgagggatgaataggagtttgccaattacagaaagaagagaaaggcatttcagccacagggaacaaatgtgcagaggcctcagagctgtcccggagtatggtgtgcatgagaccagcccatggaaaccctgaatgacagaagaaggagctcacagctgcccccaaagcagtgagaggcaggatctggggtcacggtgcctgaagattcactctctttgcccagccctgaggagcccccagctctgtccagcctgttcaccatgtccttcagcttagactccaccttcaatggggatctctccatgcccagctcctcctacatcaacctccactctgtcctcctggccagtagctcccccatggttagtcctcagttgggaagtgtgtgtcccgcgctctcggcggcgtccagagattaaaggctagaagaaccacccagctacacgaggaaaggcacatataagggtatggctggacaaaagcaggtggggaagatgatctgggggtctcagtagccccacagcttcctatgaatcagctcttttgtgttcccctacatctttagagagttacaggggaagcctgtggatgtgtctgggggacaagaaagatggacaccacagcagatgggagtcctgtcctgtcctgcctctggaagtgggcacctcacaaggagaggaagggatgctgtattcctagagcttccatccccctcctgccagaaccgaacagcacctgggagctgaagtcatgctgctgcagctggcggccctcccgcaggtcccagcagcgcaccgtgttgtccaggccccctgtccagagccgagtgccgtaatcggaaatatcaatgcagctggcgccgtccgtgtggccctggaactgcctggagggagaagggcccaggcgtccatcctggaattcgagctgccccagcatcgtcccaggtcacactcctccactccccctgcaccgagagcggccgggggcttgcccaaggtcccagcgcacctgccacccacctgaccatagtctgattctgcaggtcccagaccacaatgttgccatcgctgcagcaggagaagcaaaccttggcgtcggggctgacggccagggcgtagcaggctggggctgaggaagtcagctcggccttgatacggggggtgggcgccgccaggtcccaaatggacaaggtgctggcctcaccgcccacgatcagactccggccatccggcagcaacttgcaggaacgaatgtagttgtctcggttctggggtcggggagagaagcaggggctgggggttggtcccaggtgaggtctctaggagcctagctcaacgtgggggtctctggagcccaatgtagcctcatcctgattagcctgcaagccctaccctgattggctggtgagccccgcccctttgacctgcaaacactgccccatctgactataagctccatcctttacctataagccccacccatggttggcctgcaaaccctgtcctgattgtcttgcaagtccaattcagattggccagagccccacccctttggcctgcaagccttgtcccatgcgactacgagctccgcccctcacctataagccccgcccttcacctgtagccccacccacggccagcctgcgaacaccgccccattggaacataagccccacccctcacctgtgagtcccgcccactgtcccaccccgccctcaccaggcagtcgagctgggccacgggcgtcttggccccaggctggcccacgtcccacaccttcacacagcccttgccgcccgtgtacacatgctgtgtggagccgctgatggtgaccgcgcagaccacctcgccatgggccagcgtgtgcagctgccgggcgtgccgcgggatgcccgcgcctaccagtgcatccgaggggaagggaaccggctgcatctgcccgtccgcagacacgtggaaggagtaggccctggagagaaagccggggcatgacccagccctgggcaccacgcccccgcacccgcacctgggagggcagggagacgcctttgtcctgcctggcaccctctgatgtgttttttattttttgttttgttttttgagagggagtctcgccgtgtcgcccaggctggagtgcagtggcccgatctcagctcactgcaacctctgcctcctgggttcaagcgattctcttgcctcaacctcccgagtagctgggattacaggcatgcgccaccatgcctggctaagttttttgtatttttaatagagacagggtttcaccatgttggccaggctggttttgaactcctaacctcaagtgatctgcccgcctcggcctcccgaagtgctagaattacaggcgtgagccaccatgcccagcctgatgcgtttgtttcttttttgagatggagtctcgctctgtcacccaggctggagggcagtagcgtgatctggactcactgcaaactctgcttccggggttcaagtgattctcctgcctcagcctcccaaggagctgggattacaggtgcaggccaccacgcctggctaatttttttgtatttttagtagagatgggctttcaccatgttgctcaggctggtctcaaactcctgacttcaaatgatcctcccacctcggcctcccaaaatgctgggattacaggcatgagccaccgggcccagcctctgatgcattttttaaagtaattttctctgttattattttgtagagatgaggtcttgctatgttgcccaggctggcctcaaactcctggtttcaagtgatcctcccgccttggcctcccaaagcactgggattacaggagtgagccatggtgctcggcctctgatttaggaaaaaggcaggacaatgtggtcaaaggtgatatgggacagtcagtgggtggcacaaatacacagggagtctaggttgtggtgtggcgcatggtaaacaagcacttaataaatgttcgttcaaccgaggacccacaaagaaaccttgagtgttccagaccagctagagggtctgtcctaggagccccggccacctgtgaccagttaaaacacttaaatgaactgaaattaaataaacattttcaggccggcacagtggctcacacctggaatcccagcacttcgagaggccaaggtgggtggatcatttgaggtcaggagttcaaaaccagcctggccaacatggtgaaaccctgtctctactaaaaatacaaaaattagccggcggtggtccgtgcctgtaatcccagctactcaggaggctggagcaggagaatcgcttgaacccaggaggtggaggttgcagtgagctcagatctcaccaccgtactccagcctgggggacagagcgaaactcagtctcagaaaacaaaacaaaacaaaacaaaacttttcagctcctcagttgcactgaccacatttcaagtactgaaagccacgcccagctggtggcgactgggttggccagcagtgggtctagaacacttccatcactgcagaaagctctgtggacactgtggccagatctcctctggtggagccatcctggacaatgcaggatgctaagcagcatccctggcctccacactccaggccaggaacgtctcctcccccagctgtgacaaccacacgtgtcccccgacatcgcccagtgtcccctggggggtcagagtctacttctatggagagccagtggaactctgagtagcttatgcaagagactttttttcttttttctttttttttttttgagactgagtctcgctctattgcccaggctggagtgcaatggcacggtctcagctcactgcaacctccacctcccaggttcaagtgattctcctgcctcagcctcccgagtagctgggattacaggtgcccgccaccacgtccggctaatttttgtatttttagcagagacatggttttgccatgttggccaggctggtcttaaattcctgacctaaagtgatccacctgcctcagccttccaaagtgctgggattacaggagtgaaccactgtgcccggcccacacaagagactttctagaagggaagcagggagaccccaaccacagagggtaagacctcagaggaggtggggggctggcccgggaccccaggcagggagccccaccctggtactcacggctttcccccagggatgctgggtagggaggaagagacggatgaccctcggagatggggatgagactcaaatgccatctgtgagaatgccaggggggtgtcagtgaggcaggtgactccaacccacctctgtgccaccccacgcccacctgccatacccctctctgtttatcacccctccccaaggcagcagagatgccttctctctgcctgtcacactacagatgagagggctgaggttttcacttgagcacaccgacaccaaaatctctatccaggaaatcctagaactccacggttccaaggatcctgaagggttctccatccaatgcccagactggctctaggccagggttctgaaaactccagcccctcccaggacaaatctggtccactgcctgtttttgtaaacagtgtcccgaggccaaggccctactgctcctcttcatgcagcttaatcgctgttgcgtttttccacaatcagaagtcttgctttgtattaagcttgtgggactactgagacccccagattgtcttcccatgcatacttgctgagccagggctcccttccctttctgcactcccttgtctctccttgtgtagttggtttctcctcccggcccccagcccctgggccctgctgacacctcctgcgcccccacccaaggactcaccacgggggagcgtccgtacaccacagagctgctgacctggggggacaggtggaggctgacgtaggagctgggcacggagaggtctccgttgagagtgctgtgggagcccaggctgaaggacgtggtgaagggactggacagagtcagggggctcctcagggctgagacggaagagtcggggacaggttttgacgccctggacccagatcccgcctcccactgccttgggagctccctggcctttcatttagagtttccatgtgctggttccacattggccatagcctgggacacctccagacctctgcactatcgttcctccagtggacacgactttctctctctctttttttcttttgtttgagatggaatcttgctctgtcgccaggctggagttcagtggcgcgatctcggctcactgaaacctctgcctcctgggttcaagcaattctgctgcctcagcctcctgagtagctgggactatggccattctccttcttttaattggcaaactcctatccatccttcaaaacccaggcccaccgagcacagtggctcacgcctgtaatcccagcactttgggaggccgaggtgggcggatcacctgaggtcaggagttcaagaccagcctgaccaacatggtgaaacctggtctctactaaaaatacaaaaattagctgggcatggtggtgcatgcccgtaattccagctactcaggaggctggggcaggagaattgcttgaacctgggagcgggaggttgcagtgagctgagatggtgccattgcactccagcctgtgtaacaagagtgaaactccgtctcaaaaaaaaaggaaaaaaaaaaacaaaacccaggcccaatgtccattaacatctcagaaacatccttgagcctccccattgccaacctccagccctgcccatcttgggtacctgccttggtaccagccctgactatacagggctgtgagttttggggtctgggtcctgtccctttttgccacctgggagttccttgagggcagattccaaggccagcttctttcaggggccccagaaccagcccagggcctgaccataaggcagaaaagatgagcactgtcattcctcagattactgatggggaaactgaggctcagagaggttgggtcacttgcccgaggtcacccagctggtgaatgcccaagcctggtctgaaacccaagtctgtctggccccaaagattgtctttccagtgcactaggctgaaacccccgactaagccgcttccactctccaggcctcagtttccctacccgccgagctgacacaatgaggaactgcccagagggaggcagcgtctaacttgaagtcacaaaaaggaccaaggcaatgaacaccaagcctggaatcccagcattctgcctctccagccccttttcctagatctccccagagacgaggcctgctccagacaggcaccaacaggcaaggtgctcaccgacgctgtccgtggaaggtgctggcttggcagcaagctggcagaggtgactggccgagctgggcccgggggtggaagcgtcctggggcggggaggagtcacaggatttggaggcaggagtgctggcgggaaggtcattctgcagagaaagggcaggactgaaggccaccaggcacctggtgtcttgtggcccaacgatctgatcagaaactggggttgggggcggccagtcgcagtgtctcacacctgtaatcccagcactttgggaggcccagtcgggcggatcacctgaggtcaggagttcgagaccagcctggccaacatggtaaaaccccatctctactaaaaatacaaaaaaagattagccgggcgtggtggcatgtgcctgtgatcccagctacttgggaggctgaggcaggagaatggcatgaacccgggagacggagcttgcagtgagccgagatcacgccactgcactccagcctgggagacagagcgactccatctcaaaaaaaaaaaaaaagactctgtctcaaaacaacaacaggccaggcgcagtggctcacgcctgtaatcccaccactttgggaggccgaggccggtggatcacttgaggtcaggagtttgaggccagcctggcgaacatggtgaaaaccccatctctactaaaaatacaaaattagctggacgtggtggcgcatgcctgtaattccagctacttgggaggctaaggcaggagaattgcttgaacccgggaggcagaggttgcagtgagccgagatcacgccattgcactctagcctgggcaacaaaagcaaaactctacaaaaacaaaaaacaaaacaaaaaaaaggcaacaaagttacaaagttataggctgtcaagatttgcaattctttttttttttaatacagggtcttgctctcaaaactaacatgatcagacaggcgctgtggctcacgcctgtaatcccagcactttaggaggccaaggtgggcggatcacctgagatcaggagatctagaccatcctggctaacacagtgaaacctcgtctctactaaaaatacaaaaaattagccaggcgtggtggcacgtgcctgtagtcccagctacccactacccgggaggctgaggcaggagaatctcttgaacctgggaggcagtggttgcagtgagccaagattgcgccaccacactcctccctgggtgacagagcgagactccatctccaaaacgaaaaacaaacaaaaggcacgatcatagctcactgcagcctcaacctcccatgctcgagtgatcctcccgactgagcctcccaagtagctggcactacaggcacacgactccatgcccggctaactttttaaatttttcatagagacaaggtctcactatgttgcccaggctggtctccaactcctgttctcgagtgatcgtcctgccttggcctcccaaagccctgggatgacagggatgagccacagcacccagccactgttgagattcttgaacaacaaggaattagaaactccgggatgggctcgtggagaggcagaccccacagcggcatattcccaggtgaaggaagagtgcctagcacacactgcaatcctccttgagcccccacagagagggaggtgtcacccagagctgtccctccccaaggagagctctgaggaaagcagcagctggacctccatctaggggcaggctctgttatctcggcttcatgtcatcgcctcccctgcctcccctgcctcccaagaaacttcgcatccttgtcttgcgtctgtctcggcttcccatgacaccatcgcacaaacagtgacagccacgcaacaccggcacccgcgagagagtggatgggacgactgtggggtcagggaggacccctgagggcttctccaatacaacggagctgacccatccccttgtaaggtttttcccgcagtgggaggtgggcacttaagatggaatgggagccccaacctctggcggttgccatggtaacctgccaggaagggaggccttgaaaccgggaggggaggcctagaaaccgacatactcttccctggtaagtgtaggggaggggtctggagaagatttggggtgaggggagctgcaaaaggagctgaatttctaatgccctgggggtgcttttagatggctcacatgcctggcattaaactccaggaggtccaactgaaaacttgttcctatattaattatctttccttccggggacaacatctcagcttggggccggtgtgtctctaagcgcctctggaagggctcaacacatgcaggcctgagtccagcctagctggctgggctttcactatgtttatttccatgggatttcctattgattgcaagagagagacctgctttccatgtaaggtagtgaattgccttttaaaatttatctacaaagcttctttacaaagttgccttttaatatttactgaggttcaacaaagtcagtccaagcaggaggtttaaaaaaaaaagcacagggaaagggtggacaatgccagcccggctggctgatttctcatcactgccctctgcatcatggggtagcgtctgcttcggggcccccgggatgaataaagtgagtttcaaggccctcccctcctccttaccaggatgagctccttggctctaggcagcggtgagccaaggctagaggccaaggaggctggactgtccaccaggtcccgacgggcaggaatgcagatgggtacctttccgcagggggtggtagccgggctggggggctctgagggttggtcctgggtttgaggaggtgacgttgagcagagttgaaatgagagggaaagaagagtcccttctctatcctcctcccgactcccaccccaatctctagaatgggtacccatgacccaccatgggaagattatgaaatcttctgctgcctcagtttactcatctgtaaaatgtattttttttttttttgagtctcgctccgttacccaggctggagtaatggcccactgcaacctccgcctcctgggttcaagcgagcacatccagctaatttttttgtatttttagtagagacaaggtttcaccatgttggtcaggctggtctcaaactcctgacctcaagtgatccattcgcctcagcctcccaaagtgctgggatcacaggtgtgagccaccacgcccggcctgtaaaatgggtttaatgataggctctactccataagcacccatagcgaggactatataaaggcttggttttattttcccattgaacagatggggaaaagtgaggccagggaagggggtgtcactgcccacaaatcactcagtgaacctgggcttgaagtcactccctgtgcagtggagaggaggtcggccagaggtgtcccggagtccctgacgcttcctgaccccatcccagctgtcccacagagcggggaaccaggatccccactacctctgggtcctcccagtccagaaaacccaccccttgctctgtgcccagagtcggggaagaggctggacccctggactcacctcgtccaccaccagattgtaatcactcttgtcttcgtcgctttcctgggggaagatgggggagagagctcattgtggtcatgcccctgcctccacaccccctatccgctcctcaggagttggaggcatgagcccagccagccctggggcatgactgggattctcagaccactgcacccgtttgctcatagcagaagggaaggctgcacgtgcccgcatccgggaaggatgtggggaggcagggcaggtgggcaccttgtggagaggactttgaaggatgtggactacatgagtgccctgtgtgactcccggccctctcaggcctcagtttacccctctgcatggtgaggggagagccagagaccagcaatcatccttaccgccttcataaagactccgccttaataaataaataaataaaattcattgccaaagaaaataagactccaccttaataaataaataaataaataaataaaattcattgccaaaaaaaaaaaaaaaaagctattaggtaaaaaggaagatttaaggcttctctgagaaacagcaatattggcccaccctgagcctgccagtctccggggatcaagttgcagctgcccctgtaggtgggagaaggggctccccagctggccacagccccattccccacattcggcctggcccctgggatgctagagttggaaactacaagtgtgcagccgtctggcaatgagaggaggtcccagcctctaggaggtggtcagggaaggcttcttgtaggaggtggcactttgtttcttgatagaaaaatgggtttctaaaacatgtgtgttctagggaaagaaaacagctggagcaaaagctagagggtgggaaaatggctgtacggccaagaggccgcagagacttcaagcaactggagttaagccttgcattacaggatctcctctgattggtcagtactctgagtagtagggagctatgggaggctccggagtgagagaattatggccagagctgggctctggaaggctctgaggggccaggctggtctgggccatgcacgcccatcccagtcctgcacctgcccccactcacataaggtcctgatggctccttctcatctgctctctgcttcccgccaccaccagggccactcggtcgctcctcctccacgagactctcagggggcgagggagatgcactctgcggagagacaaaggccggggggagaaagggtcagggccctgggctcctagattgcattgtgatccagccgagactgagggtcccccaccattattagggtccggacctcaagcttcccatctgggaaatgggagcttccaacggctgactcagtgctaaggttttgttctctcttctgttttgttttgtttttgacggagtcttgctctgctgcccaggctggagtgcagtggagccatctcggcccactgagacccccgcctcccgggttcaagcgatcctcctgcctcagcctccccagtagctgggattacaggcgccaccaccacgcccagctaatttttgtatttttaatagagacagggtttcgccatgttggccaggcctatctcgaactcctgacctcaggtgatccacctgcctcggcctcccaaagtgctgggattacaggcatgagccaccgcaaccagcgccttacttcttctgcaacctctctgacatctataattatttcaaaattaaaccattttggccgggcgcagtggctcacgcctataatcccagcactttgggaggccgaggcgggcggatcacaaggtcaggagattgagaccatcctggctaacacggtgaaaccccgtctctactaaaaatacaaaaaaaaaaaaaaaaaaaaattagccgggcatggtggcgggcacttgtagtcccagctacttgggagactgaggcaggagaatcacttgaacccaggaggcggagcttacagtgagccgagattgcaccactgcgctccagcctgggcgacagggcaagactcagtctcaaaaaaaaaaaaaaaaaattaaaccattttttgaaaaacttactgacacagctcacatgacatttctgttggggagcacccacagatattgctgaacggctgatggctaggcgaacggaagtgaggatgggaagaagggtccaaggtcatgcattcatttatttaattacccgaaaaaagctggaggttgaaatttttttttcttttgagatggagtctcgctctgtcgcccaagctggagtgcagtggcgcaatctcggctcactgcaacctccgcctcccgggttcacgccattcttctgcctcagcctccagagtagctgggattacaggcgcccaccaccacacccagctaattttgtatttttagtagagatatggtttcgccatgttggccaagctggtctcgaactcctgacctcaagtgatccacccaccttggcctcccaaagtactggggttttaaacactacagccttctgggtatctcccacacagaaaggcttcaggaaaccgggctatggatcttgtttttttattgttgtggttgctgttgtttgttttttgagacagagtctcatactgtcgcacaggctggagtgcggtggtgcaatctcggctcactgcaacctctgtctcccaggtccaagtgattctcctgccttgacctcccgagtagctgggattacaggcacccgccgccacgtttggctaatttttgaatttttagtagagacagggttttgccatgttggccaggctgcttttgaactcctggcctcaagtgatctgcccaccttggcctcccaaagtgctgggattacaggcacgcacctggcctggtttttttttttctttctttcttttttttttttttttgagacagggtcttactctgtcacccaggttggagtgcagtggcacgatcacagctcccttcagccttggccttctgggctcaagtgatcctcccacctcaggctcccgagtagctgacacaacaggcatggaccaccacacccagccaactttttgtatttttctgtagagacggggttttgccatgttgctcagctggtctcaaactcctggcctcaaatgattctcctacctctgcctaccaaagtgctgggatcaaaggcgtgagccaccatgatcgacctaggtctcattctgaggcccccatcagctcagaaccagcgttggcctcccaagaatataaaaagagtcccagggtgccactcacttaccctgctcggggctctctccactgacagattgggaatgggataaagagaaagaaggagaaagaatgaggcgtttgtatccacggcgccagagggtacagccctccagtttataaagccccccgcccccaccaccccactcagagtctctctacccttccaacacccttgcaagtggtggattatccctcccctgcattcagatcaatgcccagagagggatagtgacttgcctcaagacacacagcccattgggggtgatgttgaaccccagggccttgcagccgctctcattgatcccctcacactttacgagttggggtcttgctctgttgcccaggctggagtgcagtggcccagtcacagttcactgcagcctcgagttcccgggctcaagtgattgtcccatctcagcctcccgagtagctgggactccaggggcatgccaccatgcttggcatttatttatttatttatttatttatgaatgagacagagtctcactctgtcgcccaggctggacttggctcactgcaacctctgcctcccaggttcaagcaattctcttgcctcagcctcccgagtagctcagattacaggcacccaccaccatgcccagctaatttttgtatttttagtagagacaaggtttcaccacgttgaccaggctggtctcaaactcctgacctcaggtgatctgcccgcctcggtctcccagagtgctgggattacaggcgtgaaccaccgtgcctggctatctatttttatttatttatttatttattttaatttttttgagacagagtctcactctctcactcaggctggagtacagtggcacaatcttggctcactgcaacctccgcctcccaggttcaagcgattctcctgcctcagcctcccgagtagctgagattacaggcacccgccaccactcctgcctaattttttttgtatttttagtagagatggggttttcccatgttggccaggctgctctcgaactcctggcctcaggtgatccagccacctcggcctcccaaagtgctgggattacaggcataagccaccatgcccagcctgtgcttgactaatttttaaatttttcatagagatggcgtcttgctatgttgcttgggctggcctctaactcccggcctcaagtgatcctcctgcctcggcctcctaagtacctgggaatacaggtgtgcaccatcccacccagcaaatttttaaatttttgtagagacggggtctcgctctgttgcccaggctggtcatgaactcctgggctcaagcgatcctcccgcctcggcctcccaaattgttgggattataggcatgagccacttcatcccctcacgctgatgtttgctaccctggactgccagtcgtcctccccagccccgtctccccagccaatgccaccccgtgctgcccactcacctctggacccctcggcctccacgcccgcacggtcctccttgacagccgccgccagctgagcctgggcagccagggctccagacagagcaagcagccccgtagcactgccgcccaccagcccggctgggcggggggtgaggggcacagggggtgcgtggtgggacagcggctggagctgctgctgctagaaaggaggcaggatgggccggggcggggggcggcaggagcccagcggtccccagcccaagaggtagacacaggggatgggacctaagcacagcatgtgcccctggggttcccaggaccactggagccaaggcccacacaccaccccagctttaacacctcctgggtgggtgccagggacctgggagtgggcgtctccccatggcggggcaggggctagagagactcaccccgatgaggctgttcagctcccccacggtgacctgcttggcgcgttctacggcctggagcacctgctgctgatgctggcgggtggaagggatcaggtagagggtacattgagcccctgctcatgctagcggtgcccttggggacctgacctctccccgccaccctctcatctttgccccggtacttcccatttctcttttatctttttccctctcactctctccctttccttttggaattttgaaataagcacacggagaaagaaaccaaacctaagtgcaggtagaatagttacaaatcaggccgggcatggtggctcacgcctggaatcccagcgctttggaaggctgaggtgggcagatcacctgaggccaggagttcgagaccagcctggccaacatggtgaaacacctgtaatcccagctactcaggaggctgaggcaggagaatcgcttgaacccgggaggtggaggttgcagtgagccgagatcgtgccaatgcattccagcctgggtgacagagcgagactctgtctcaagaaaaaatatatatatattacaaatcacagtctctcctttggagcatcgaagaaccaaagacatctggggctggattgttctctggggcggggctgttccaggcactacaaggagccgagcagcatccctggcctccacccactccatgccaggggcacccccagttgtgacaaccacagacgtctcctggtggtaaaactacccccaagaaaaaaaaaacactgtgataaatcggcaccatggacccttctcctaggttaaggaacagaaagtaccagactccaggggccccctacactccctgccatcagaacaccctccctcctccaccttcatgacaataatttctttgtttttctgtataattctgcctcctacgatcgccttcctaaacctgcgtggatttgtccgttttcaactacgttgtgggctcattctctgagttctctttggcatctggcctctcagcataacattttaagcttcttccatgatgtggtgggtggcggcagcatattcagctttcagagctgtgggactctgctgcgagaaaatgttatatctgagccgggcgcggcggctcatgcctgtaatcacagcactttgggaggccaaggcaggtggatcacttgaggtcaggagttcaagaccagcctggccaacatggtgaaaccctatctctactaaaaatacaaaaaaaattagccagacgtggcggcgggtgcctataataccagctactcgtgaggctgacacaggagaatcacttgaacccaagaggcacaggttgcagtgagccaagattgcaccactgcactccagcctgggagacagagtgagacccagtctcaaaaaaaaaaaaaaaaaaaaaaaaaaggggggggggtgctgagcgtggtgactcacacctgtaatcccagcactttgggaggctgaggcaggtggatcacgagatcaggagttcgagaccaacctgaccaagatggtgaaaccccatctctactaaaaatacaaaaattagtcaggcatggtggcatgcacctgtaatcccagctactcgggaggctggggcaggagaaacacttgaacccgggagttagagattgcagtgagccaagatcgtgccatgcactcccgcctgggtgacagagcgagactcagtctcaaaaaaaaaagaaagaaagaaaatgttgtatttttgctgttccacacagaagccactggccatgtgtgtggccaccaggcatttgacatgtggctggtgcaactgatgaatagaatgattaattttattaaatttaagtgaatacaagtttaaatataaaataaatttaataggcttatttttatttttacttttttgagacgtagtctcactctgttgcccaggctggagtgcaatggcatgctcttggctcactgcaacctccgcctcccaggttcaaacaattctcctgcctcagcctcccaagtaggtgagattacaggtgcgcaccaccacacccaactaattttcatacttttagtagagacggggtttcaccatgttgaccaggctggtcttgaactcctgatctcaagtgatttgcccccctcagcctcccaaagtgctggtattacaggtgtgagccactgcgcccagcctaaatataaatttaaatataaaattaacttaatagatttcaggtcgggcgcagtggctcatgcctgtaatcccagtactttaggatgctggagtgggaggattacgctagtccaggagtttgagaccagcctgggcaacatggtgagactccctctctgttacattatacatatatacttatttaagccggagtctcactctgtcgcacaggctggaatgcagtggcgtgatctcggttcacgctaacctccgcctcccaggttcaagcaattctcctgcctcagcctcccgagtagctgggattacaggcacctgccaccacacccagctaatttttgtaaaaaaaaatttttttaggccaggtgcggtggctcacgcgtgtaatcccagcattttgggaggccgagccagatggatcacctgaggtcagtagttcaagaccagcctggccaacatggtgaaaccacccccccaccccatctacaaaaatacaaaaactagccggcatgatggtgggtgcctgtaatcccaactactcgggaggctgaggtggaagaatcgcttgaacccaggaggcagagattgcagtgagctgagatcgtgccattgcactccagcccgggcgacagagcaagactctgtctcaaaaaaaaaaaaaatttttttaaggaaaaaaataatagatttaaatattattaatagttaacctaagtgtaaatgatcacacggggctggtgactgccgtgtaggatagcggaacagtagtatattccactgtatgcactctgaggctgcttgtgtatacacgctcctgaagacagacatctgggctgtctccaccaaggaggtatcaggatgcggatacagagctcccatgggggtgcacctgtgtgtgggtgtgtgtaggatgggttggaagactttctagaaagggccagagagtgaaaacattttccctctgcaggccagaggtctctgttgcaactaccaaactctgtcactgtaatgggaaagctgctggaaatgatatgtacatgagtgggcgtggctatgtcaataaaactttatttgcaaaaacaagtggaggggtggagctggccctcgagctgcagtttgctaattcctggaaatgtgtgccttactcattcctttcaacagtcattttacctaatcttttttttttttttttgagacagaatctcgctgtgttgcccaggctggagtgcaatggtgcgaactcggctcactgcaacctccaccccccgggttcaagcaattctcctgcctcagcctcccgagtagctgggactagcccagctaatttttgtatttttagtagaaatgaggtttcaccatactggccaggtgggtctcaaactcctgacctcatgacccgcacgccttggcctcccaaagtgctgggattacaggcgtgagccactgggctcggcctacctaaacttcttgcggctcttgcctttctctagaccacctcgtccccactttccgctgcagatgctctttatgttctgtgtctacacaggacctctccccaccccaagcttccagaaatctcagactcagtggaatctgaacaaactgagcatctcccctctgggtttggtcctcaaggcatcaaggatcctcccagtgtatccactctgaagtagaactatctttcacgtctctctgaagagagaacgtaccacacagaaacagggacagtgcaggctgggtacagtggctcacacctgtaaacccaacactcggagcctgacacgggcggattgcttgagtccgggggttcgagaccagcccgggcaacatagggagacccgtctctactaaaaatacaaaaattagccgggcgtggtggtgcacgcctgtaatcccagctactcaggaggctgaggcatgagaatcgcttgcacccaggaggtggaggttgcagtcagccaagatcatgccactgcactccagcctgggtaacagagcaagaatccatcacacacacacacacacacaaaagaaaagaaaaagaaaaaagaaacagggactgtgcaaaggtactgaggatgaaaggaacctggggcactctcagaagagctaactttttttttttttttttttgagatggagtctaactctctcacccaggctggagtgcagcggcgcaatctctgctcactgcaacccccgcctcctgagttcaagcaattctattctcctgcctcagcctcccgagtagctgggattacaggcaaacaccaccatgcccggctaatttttttttttaagttttagcagagacagggtttcaccatgttggacaggctggtctcgaactcctgacctctggtgatccacctgcctcagcctcccaaaatgctgggattacaggcaggagccaccgcacctggccgaattacagtccattttaaccatttgtaagtgcacagctcagcagcataaagcacacacacggttgtgcagccatccccagcaccatctccagaattttcccatcttcccaaactgaatttctgtccccataaaactctcactccccgtcccctccccaacccctggcaccccccattctgctttctgtctcagtgaacctgacgaccctgggacctcctaggagtggatcacccagtgtttgtccctcagtgacttcttctagcaagacggtagggttaactttcatcaggtgctgagtaagcgtacccatcatctccagcaccctgggtgtatgagctcatctcaacttcacacctacgctactgaaaaaacagagacaagtgtcctgcctgaggccacacagccaggattcagacccaggcagccaacttgcagggcttgagggggtcagctctatgccttgcttcccatcaagggggaaaacagcccccagtcctcaccctcagccaacacctccctccatccctgcagcccctgccccagcgggatgcctggcctcagggctgcgggactactgcagtgaaaatggtctctatccgtgctgcaggctacgcggcagaatcagtgcctggggcgtcctcgcccagacctaccccctcccgtcttcttccggctcccttcccctcctccccccacccccaggcccactcacctcctgggtcaggaaggggataatctgagcgcagataccgctcagacgcttcacaatctccgcctggcaggaagcaatgagaggaagcttggagcggggtagagatttgcaacccagctctggactcccaggcggaccaggtgttggcaaagccgaagggttggggaggtgacgcccgcaggtgcacagagggaactcaggctagcatggcatgggccgaggtgggattcagagccccaccaggctgcgtgctcagctgagcgaggcccagggtggcctggagctgggaagaccagggctgaggtcctacgagtcacagatacaccacccgccagacgcacacccgccagggatttgcaggaggcagacgctcagacacccaactcagacgcagacactcagaggtgctgggctcagctgaaacaaaggaaaggggcctccgcctggagtcccagattccagccccggcttggcccacgtctgtcccaggcaaggcccctttcttggtctcctccgcttcccaggactgatctaccagctggggatgcctccaggtggagatctcagcacgccacactcaagggaaggatttcatctggagagggtctgggcccaggtgccccaaagaggctgagcagacgagaaggcgtgtgggtggggaagggggcgggcatacaatggccacggactttgcctctgcctgagttacaggtgtgctgtgtgtctggcgaagtctgtgtctcctattcccaccaggagggtggaactgggatcccagggtgtcccgcaccccataaaggggggtctattgcgtggacccatgggaccacgccatgcttcagcagacaagccccctcctgcccacatcagaaccaacagaacccccacacatgcaggaaagcatgccagggtgggcaaccccaggcaccccacactcccagcccacccccttctccttcccagccaccgggaagtcccaatacaaggttctgctcattgattctaatattctgatagaatctaggagcccatgaagctcagaagtttgggacccctctcatccctttagaaaccactggccagtctcaggatctcaggattaagcatggaccactaaagtcaattttagaatctttgggtctattggccgggcaaggtggctcactcctgtaatcccagcactttgggaggccgaggcaggtggatcacctgaggtcaggagttcaagaccagcctggccaacatggagaaaccccgtctctactaaaaatacaaaatattagccaggcatggtagcaggcgcctgtaatcccagctcctcgggaggctgaggcaggagaggcgcttgcactcaggaggcagaggttgcagtgagccaagatcaggtcattgcactccagcctgggcaacaagagtgaaactttgtctcaaaatttaaaaaaaaaaaaaaaaaaaaaaaatctttaggtctatctcagaaccttgagatcagaagttcgggaatagcctcagaaccttttaacacatctcagcacatagatatgataatcgcagaaccctgaggtctatctctgaaccctgaggtcaatctcagaaccctgaggtctatctctgaaccctgtctatctcagaaccctgaggtctatctctgaaccctgatgtctatctcagaaccctgaggtctatctctgaaccttgagatcacaagttcaggaacacctcagaaccttttaacacatctcagtacacagataggacaatctcagaaccctgaggtttatctctgacccttgaggtctatctctgaaccctgaggtctatctcagaaccttgaggtctatctcagaactctgaggtctatctctgacccttgaggtctatctctgaaccctgaggtctatctcaggaccttgaggtctatctcagaaccctgaggtcaatttcagaaatttgaggtctatctcagaaccctgaggtcaatctcagagccctgaggtctatctcagaaccttgaggtctatctcagaaaactgaggtcaatctcagaaccgtgaggtctatctcagaacactgaggtcaatctcagaaccctgaggtctatctctgaaccttgaggtcaatctcagaaccctgaggtctatttcagaaccctgaagtctgtctcagaaccttggatcacactgagaagctccagaagaggctcagagccttacgacactggagtcaatctcaaagccctgaagacagccacagagttttgaggtctattttggagtagtggggtcacagtctgaaccatggcatcaaattcagggcctggagaacaatcttggaaccttccagccaatcacactgagaccaatctcagaagcttcaaagcagcaacagaacctggggtccatctcaaaacttcagactttctgggttgaaagggacctctaagagtggccatccagctccctcctaggacagaagtcacttccacagcctccctggcctggctgccctgcctctgctatgtgccctccttgatggggatgcctggtggcccctgcccactgcctgcatctctgctggacgctccaactgctagatactgtcttcagaaggtgggactcattttccttccacgaggctgaaatctgtcttcctggtcccagatgggccctctgtgacctctgcggagatttcaggatgagacccgtgttccctaggtctgctctggccccggctgcccactctgggtccttctcagggcttccagacccccaccctccctcctgaacacgcgtaaccccaacccagttacctgcttatgcatttcaatgttgagcccgtacgacatctcataatactgcaaaggaaaaaccaagtaagaacgtctagggtggagatgggtgccctcctccagataggtgatgccagggtcttccaagagtccccaggttcaggggaatcacagcaggaagcagagccccccccagctccacggggtcccagaggaggaagcgggggctctgcctggaagggccccctctactctccccagagaggcagggcaggtaggaagtgtccagaggccctggcccgacagagactcccatcaggcgaggggtcctccctgtctccccattcccagagctgggaggaccctcctagagagcctgaaatcccaacctgcccaatgtacagacggggaagacgaggttcggagtggggcagggacctaccccagagtccaccgtgactcaaagccctgcccgcctctcccctcaccctggcatcataagtgccctcaccatgacataatgtcgctgcatttccgtcttctcgctggccagcttctcacattctagcttgaggctgagaagaagagagagggcaaggggctcccacccgccccatgtgggccggcttccaaagtgagaggctggatctccccctcccgacttccttacagacctccccccacctcctgtcccagtccctccccgccccttcctgggctccaaatgccccagctctgactgtccccagacccctctgcacctgcgcttccacctggaggcctttgtcgcgccccccctccaaccgggagcccctcctccccgccctataccccggaggcctcgccccgccccggcgcccaggtgaactcccgcggcccctggggcggcccccctcacctgtggtattgagcctgaagaaactggaattcttctttgatgcggtcgcagatctccaagatcgagaacttgaagggctggccggactggagcggggtctggggggggtgtgggggaaacgtcagggtctgagttcccggacactgggggccccctccccgcagtccgcactcaccgggtgccttccctgggggtacatcctgccgatccgaaaagccccccaggcgccaccagagcttgatgatatggaggcggcaagagtgggggaggctgaagtggggtggtggggaggctgcccgaagaaagagggaggagggagaagcggcgcggggcaagggaccctggagtccctggcgcgcccccaagcgcgcgcgcccggggtcgtgggagcccctccccgggttggggtgcgcggggcgagcggggcgggcaggggcagcggccggggcgggagcgcggcgagggcggccgcggcagccggcgcagaaggtcgggcgcgccgcggccgggtttcggtggcggcggcgcgggcggcgggccccgcgcggagccgcctccctccggcggggctcggccgggagccgcgggctgagccgccttaaggtggcgccgccgcccccacgcgcccgcggcccgccccgcgcccacccccgcgcaccgcccctccccgcgcccgcgccccccccggcccccgggcacccgcccccttccttcagtccctgggccgttggggaaactgaggccgggtggggaggcgcccagtgccttaaaacagggtccccaccccctcccggaggggcgggagaagaaaaaccagtgaagaaattcacaccgtgttacccaccgtgggagcgggggggggggcttgcggggagcggggaccagtctggagtcggaaatggcttttctgagcaagtgacattgggttgagattgaagggtcagcaggacgcagccttgccaagcgctggcagggaaccctgccagaaagggaatctcacagcaaacactgcttcccagatcatgccgggccctcgccctctgggggcctcagtagtctctgcaaaaggtcaggggtggtgcgctatctttagggtttaattttttgcagagatagggtctccctgtgttgcccaggctggagtacagtggggcaatcatggctcactgcagcctcgaactcctgggctcaagcgatccttccccctcagcttctccagtagctgggactacaggtgtgcaccaccacgcccagctaattttttaattttttgcagagatggagtaggggggcgtctcactatgttgcccaggctggtcttgaactcctggactcaagcctctctcttcggccttccaaagtgctgggattacgggcgggagccaccgcactgggcactgcacttaaatgagatagtgcatgaacgctgtcagcctctccctacacagagcaaacttccacagatgggaattgtgttcctactgccatcaccagtggactgggctgtctcccctctcagactgggtttcttgaaggcaggagccgtgtcccactcagaactggaagaaccacagctctgccatcagactcaagtctctcccacggcaaaggctccagccccgaccagagaccacagacatccagccagcatccttcaggcccacccggggagtgggaagttcttattctctttggagaaacctcaggagaggtttgtgaagtcaatcaacaaacgtgtactaaatgcatactgtggaccacacactgctgtagacactggggcacagctgggaacaaaacagagaaaaatccatgccccttgatgacacttggacttgtgtccttaggtgatcgagtacctaatggtacctaagggttagggttacaaaaacccattttgtacccttacaaaagggcacaagagcccttatcaatgggccaggggtggtgggtcatgcctgtagctccagcactttgggaagctgaggagggaggatcgcttgagcccaggagttcaagaccagtgtggacaacaccgcgacaatacaaaaaaacatttttgtgttttttgtatctctacaaaaaatacaaaaataattagccaggcatggtgatgcacacctgtggtcccggctacttggggggctgaggcgggagatacctgagccccagaaggtcaaggctgcactgagttgagatcacatcactgcactccagcctgggtgacagagcaggaccttgtctcaaaaaaaaaaaaaaaaagcccttatcaaatttaaagccatcgttttccagcccacagatatttacagagcacctatgacgtgtcaggcatccttccaggcacagggattgtaagggtggataagggagacagatccctgccctctctgagtttgtgggatgtgagtgacaggctaggcaggttcacagcttggtaattatgggactatttgtacagacagaggaagagtttagagggcagtgatagagatgaacaaaagcaaacctgcttatgtggggtgtctgggagaggacccttgggggagggtagccttggagatgagacctgaacgatgaggttgggcagctctgggaagggaggaaaagagacacagcctgggataaagatacaattgtgtgtgtgtgtgtgtgtgtgtgtgtgtgtgtgtgtgtgtgtgtagtactcactagctccctattgccctcaaaataaatccaaactcatctctcttcccacaaggctcttcacaaaactcttccccttttccccttcaccatctctttatgttttgtttattgtttatagagacaaggtctcactgtgttgcccaggctggtcttgcattcctgggctcaatcgatcctcccacctcggcctcccaaagcactgagattacaggcatgagccactgcacccggccagccagcttcatgatctcaactccggtcattttcgccctcactcactctgcccaagtcacactggcctcacaccaggcacagtccagcctcagggccattgcactttctgttccctgtacctggaatgcttttcccttgcttcttatcattcaagtctcagctcaaaagctacctcctcagaacggcccctcctagccacccatttcaacagcttctgcccaccccgttattttcacactctccatcctattctccctctcttcccagctcctaccatagtgtgtggctttttgtttgtttttgtttttgttttttgagacggagtcttgctctgctgcccaggctggagtgcagtggcgcgatctcggctcactgctgcaacctatgcctcccgggttcaagcgattctcctgcctcggcctctggagtagctggtattacaggctcccgccgccatgcccagctaattttttttgtattattagtagagacggattcaccatgttggccgggctggtcttgaattcctgacctcaggtgatccacctgcctcggcctctcaaagtgctgggattacaggcgtgagctaccatgcctggccttcggtttttttgtttttgtttgttttgagacggagtctcattctgtcgctggagtgcagtggcgtgatctcggctcactgctgcaacctctgccttctgggctcaggtgattctcctgcctcagcctcccgaatagctgggattacaggtgcccaccaccacgcctggctaatttttatgtttttagtagagaccggctttcgctatgttggccaggctggtcgcaaactcctgacctcagatgatccaccctccttggcctcccaaagtgctgcgattacaggcttgagccaccgtgcccagcccacagtgtgttttggatgtgagtatgtttactcggaggttgttcgcgtccttgtttgtctccctcaccacgaagaaggctgtggagggactgagcctgtctaggtctctgcggggcctggcacacagtaagtgctcaataaccagcctaaagccagaaaccgccggccacactccctgcttggaaattctcacaaacagggagcgccatcattctacgctgtcaagagtccgtgattccaggttcttgggggtctgtgaagtgctgattccaaaccctttccggcaggtgtttcactgctcctgggaggccaacatctcccctgcctggaccttgagcatacatggtagcctctgtcctcattgtctgcaactgtccaccccacatcttccttcttgttggttgttttttttttttgacggagtcatgctctgtcgtccaggctggagtgcagtggcacgatctcggctcactgcaacctccgcctcccagtttcaagcgattctcttgcctcagcctctcaagtagctgggattacagatctcggctcactgcaacctccgcctcccaggttcaagtgattctcctgcctcagcttctcgagcagctgggattacagacatacaccaagcctggctaatttttttttttaatggagtctcactctgtcgcccaggctggagtgcagtggtgccatctcagctcactgcaagctctgcctcccaggttcacaccattctcctgcctcagcctcccaagtagctgggactacaggcgcccaccaccacgcccagctaattttttgtatttttagtaaagacagggtttcaccatgttagtcaggatggtctcaatctcctgacctcgtgatccgcccgcctcagcctcccaaagtgctgggattacaggcgtgagccaccgcacccggctaatttttgtatttttagtagagacatggtttcaccatgttggccaggctggtcttgatctcctggcaggcgatctgcctgcttcagcctcccaagtgctaggattacaggtgtgagccaccgcgcccctccagatcttccttcttctgcctaagcccctggctctggaaacccaatggctccttcttgacctccattacaatgcttgctcagagcagcctcacctccctctgcggggctctcctgtccgggcggccctcttccctctctaagcacaggtgtggtggctcaaacttgtaatcccagcactttgggaggccaaagaggccaggagtttgagaccagcctgggcaacatagcgagacccaacccccaccccccatctctacaaaaagtaaaataacaaacgtaggtctctgtccttccttagcccggtcacttgaatgtcaacttgactcacacctctggcttccagggctctgagacaccgcctctccctccaggcttcagtgaccgcctcgtgaggatggctgcaagctctggcaccacctccggttcctactctgagacccagccctgtgggtccagccaccaactgggcatctcccctagaggtcccccagatctcagactcttaccccctgctcctatcagggttcccacacacatcccccagatactctaaaccagagcatcaccctagccctctattcccaacacctggcctgcaaccctcctccgttctccccaccccagcagcccccaccctgaccaggcctttgtcctctctcccatctggaccacagccacctcctccctctgagcagcctttgtttttggtgatcttcaattggagcctggccctccttccctcaaaccctcccctggctccctattgccctagggataaatttccagctcttcaccctagcactggaacctctgcaaccctgccccagccagcttcaccttcctccaccagatcacaccacacccccaaccccctccagccaccctggccagatcacctaatttgtgtcctttctttcccacctctgagcctttccctgcttgttatctcttcctggaattccctccccctccttttatgcctggagaaagtccatttttttcaaggcccaacccaaaaactgtctcctgcaaaagccttctcccccagcctcctgtcttcttcgcctcctgtcttctccatacgcgcgtacacacacacacacacatacacacactggatataaactgcttggtgttggtggataaatggatgtttagtctacgaacacctccacatgctgcaagaggctggattcctagagaagatccagccctaggccttccagggaggggctcccagagcatctggtggggacagaggtacagggacacgtaccctcccagggtcacatagggtcagtgtcagcacaggagcgagctaaggatgaaggcagagccgggcgaggaacaggggcattgcccggtgagtgagctgaggctccctagagcaggggatctttacccagcagtcttcagatccctctaacaggcacactgcaccggggagggtaaatacagatttgtggattgcccgagaagccacaagaccacacacgcacacaggaacacaccccatcccttagtgtgtgatccgccaggaaggaggagtttttgctctgggcagcaacatccccaactttgggagcagcgggtggaatttggggagactctgctgccagcaactgtgtgcatactggggaacccttggccgcctgtgactccataactccccaaaataccacatccggccagagcaggaagcagggaagcaacctgccaggcgtgttccaacgtgggtagagtccccagcgacttcatttgccacgcgggacttcacggaccccctctttgcgcctcagtttccccagctgcaccatcagggaagaagctgccagaggggaaaaggagctcagccgccgatctcccccttcccattacagagaggctcagcccctggttcctggctagggttttacgttgtggatgtgggtttacggaaaaaaaaaaaagggaaaaagctgagaagctgcgctgggaccccggattgctcagaccaccttaaatcagcctggccgccccagctactgtggaaattcctttctccgcggtggttggctgggggcgccagccaatccgctcgcgacgctcccacatgggtcagtgacgtcacataggaaactggccaatggggattaggagaccagcaaccaatggcaggaggcactgggatcagtagggccaatcggaaggcagctcggcgctcccggcggggtttggcgagtgtggcccccctccctaggagaatctgagaccctagtggacgcccgagctcgaccggattggaggagggggggctaaggctccattattatccagaaacaggggaaagcgagtcacccccaagcctggcctatctccccttcaaaacaagggaccctcgtgcaatatgctaccagctagctggcggagcagaggttgcatctttctccctatttcacagataggtaaactgaagcaaagagtagttaagtcacgctggacgcccggcgaagagctgaagctcttacccgagcctgggggctccaggaacggtctcagttttacccccaggtgggggggatgggcctataggtagtcaggggtggaggggggtggtgctgggccttgtgcctcagtttccccgagcgtggaagctggaggagagcacgggttttcagaaaaagactacgattcccagaagctcccgcgcggctcccgcccaggctgtcaatcaaagtaacgtgggtacctctccggcccgcgctctcccgcccgtcgcctccctcccgccagctcccgctccctccctgccggctcccggcccggcgcggtataattacagcccattgatccgacccgggccgggaaagcggctccctcggggaggccaagcctttggcttccgacaccgccaacctctgcctaccgccccctccagccgaactgccgggccaccagccaggcctgtcccctcccgctggccccgggctcgcgggtgacctctgagcctcagctccccgccacgcttggcggtgtgccccccggaaaaatcacacacacatttccttccacccaggaacatgaggagccatctccctagaacctccagggcctctctttgagcctcagtttacccagatgcacagtgagattgctggacaaaactttcatgaaacccatactccgtgctgttctgcctgggagcagccagggctgaccttggtggaaactcaaggaggggctcccaagtttgggaggagggggagacagcccagctctctcagaacccctgtggtcggggttggggttagggaggatcagagctgggggtgggagtgggggcaggctcagccaggatttagcgcccccattgggaagttgggatagctttctagatgttgggtggtagtatttaatagatgttggggcagggcgtggtggctcacgcccgtaatcccagcacttcaggaggccgaggcaggcggatcacctgaggccaggagttcgagaccagcctggccaacatagtgaaacccggtctttactaaaaatacaaaaattagccggacatggtggcacgctcctgtagtcccagctactcaggagactgaggcaggagaattgcttgaacctgggatgcagaggttgcagtgagccgagttcgcgccactgcactctagcctggacaacagagtgagactctgtctcaaaaacaaaaacaaaaacaaaacaaaacaaaaagatgttgggtttcggtatttaagctagggttttgcagaatgcataggagttgcctcatttgagcagtgcctttagattaccctaaccctaagtggacagaagaaagatggggcagccttaagccctttcctgtgacagagtgagccttgggctctgacccctagctttgctgtgtggatctgggaacatcccccagctgtgaagtgtcggggaggtagataccccctagggttagaaggcccctgtgcctactttcgcatgggtcctgaagtcacagtgggttctgaccagcaggagtcagggcctgggagcccgtggtaggaggcactaggattggctgaggggctcaggaactccagcctctccctgagtaagaactgggcggctgggggagaagtcccagagtgacaacggctcagtgccaggcacgtttactctgcttgggtttccttgtctggaacacaagattaataatagaatcttcaaataaggcctataaagtacttacaataatgcatagtaggccgggtgcagtggctcacacctgtgatcccagcacttagttgggccaagatgggtggatcacctgaggtcaggagttcgacaccagcctggtcaacgtggggaaaccccatctatactaaaaatagaaaaattagtcgagcaaggtggcacacgcctgtaatcccagctactcaggaggctgaggcaggagaatccttggaacccagaaggcggaggttgcagtgagctgagatcacaccactgcactccagcctgggggacagagcgagactctgtctcaaaaaaataataataacaataacaataataataatgcatagtaaatgctccataaagggtagctatttgtactcccaacatttattttgtccttattattatttgagacaaggtctcactctgtcacccagtctggagtgcagtgccaccgtcatagctcactgcagccttgacctcgctgggctcaagccgtcttcctgcctcagcctccggagtagctggaatcacaggtgtgtaccaccacactcagctaatttaaaaaaaatttttttgtagagacagggtctcactatgttgcccagactggtcttcaactcctgggctcaagcagtcctcttccctcagcttcacagagtgctgggattacaggtgtgaaacactgtgtccagcccccactatgtcctaaagggtccttctctcccactctcccctcacgctccacatctatgctatgcattctccattgcacccacatccttgatgatccattgaaatgtgaatcagggctgggcgtggtggctcacgcctgtaatcccagcactttgggaggccaagatggagggactacctgaggccagaggttcgagaccagcctggccaacatggtgaaaccctgtctctactaaaaatacaaaaattaaggccgggcgcagtggctcatgcctgtaatcccagcactttggaaggctgaggcgggcggatcacctgaggtcgggagttcaagaccagcctgaccaacatggagaaaccctgtctctactaaaaatacaaaattagccagggtggtggcgcatgcctgtaatcccagctacttgggaggctgaggcaggagaatcgcttgaacccgggaggcggaggttgcagtgagctgagatcgcaccattgcactccagcctgggcaacaagagcaaaaccacgactcaaaaaaaaaataaaaattaaaaaaaaaaaattagctgggtgtggtggcgggcacctgtagctgcttgggaggctgagacagaattgcttgaacccgggaggcggaggttgcagtgagctgagaccgtgccattgcactccaggctggccaagaagagcaaaactctatcctttccccactccaaaaaaaaaaaaaaaaaaagtgaatcagagtccatccctcccttgctcaagaaccttccatagctccctattgccctcaacataaaatccaaactccctacctctgtctatgtgatctgacttccatcgcctccctcctctcacctcctcccacttctccccctctgttccagccacacaggccttctccctcttcctcaaaccagagtctagcctcaagacctctgcactgcattggttgttccctctgcctgaaccacggccagcctttctcttcctttcagatcaaacatcacatcctagagaggccagcctggctagagtagctcccctcctcctacctgctcagcttccctcagtcttccgaggcctcgtggctctgggaacacatactatctgctccctcctgtgtgtacggtctgcccaggccccaacacaccaccggctacactgtatttattgggagagtaagtggacaagcccatagagggatagagcctcaccaaggtcacccagcatgacggacgcgatgccaggtcccctgctaacctgcccagcgctaacacaacctgtaggggtcagctgagatcgcagagatcacactacctccagaggctgtgagacccagtgtcactgatgtgcaagcctgggttcaaaccccacctccgccactgcgtcactgtgatcctgtacagtgggataattatagaaacgtctcattgagtcatcacacgatcaaatagctcgatagatgaaaaggccccgaccgttattattgtgtgggagtgtgtgcggcccagcggggacaatttggggtgcggaagcagagctggggctggcaccacagacaaaccccatttttaagcccctagggccttctggtcattgcagcaaccccatcacccacaccacgtgtaacccctctgtacccagttgggggttcaccctcctaggatcgccatggactcccgtctctatctccaccctccctccttccctggagagctcattgctgggccccaaactcgcccagcctggtccccctggaaggcacagcacagatgggggttgaacaaacccctggccgcatggcccaatctgaatcttctttttaacgtttgtttgttttttttttaagacagtctcgctctgtcgaccaggctggagtgcagtggctcgatttctgttcactgcaacctccacctcccgggttcaagtgattctcctgcctcagcctcccgagtagctgggactacaggtgcacaccaccatgcccggctcatttttgtatttttagtagatggggtttcaccatgttacccaggctggtttcgaactcctggcctcaagggatcctcctgcctcggccacctgaagtgctgggattacaggcgtgagccatctcacccggcacagcattttgttttttgttattgttttaagacaaggtctcactccgtcgcccaggctggagtgcagtgacatgatcacggctccctgcaagcctcgagcaaaatcctcccacctcaacctcccaagtagctgagaccacaatcgtgcaccaccacgcctggctcatttttttagattttgtagagatggggtcttgctatattatcgacctcaatctgaatcttcctcatccagtttctggtttgcagtgagaccttttaacccctgtggacctccgtttgctcatctggaaaaggggcatggtactgtcaccaaccccagagtggcccttgatgacagcctctgctgccatttatatatatatatatatatatatttttttttttttttttttttttttttttttgagacagagtcttattctgtcgcccagactggagtacagtggcgagatctcggcttactgcaacctccacctcccaggctcaagccatcctcctgcctcagcctcccgagtagctgggattacaggtgcgtgccaccacgcctggctaatttttgtatttttagtagagatggggtttcaccatgttggccaggctggtcttgaactcttgacctcaaattatccacctgcctcagcctcccaaagtgctgggattacaggagtgagcccccgcgcccagcctgccattgctattatcactgggctacctggttgatatacacaccatggccctccgaattatgggctgagagcttgccctgtgatgggtacagtgccgcctccaggcttcgccaccgggattccctctgcctggagcacccgcccctccctgagagccacctcccaacatgggctcttgctgtcaaaccctcctcggctcaaatgtcacctcctcagagaggcctcccctcctctcctgggccaagcagccccgtctctctctgtcaccaacccttgctagatttttcttcctaccacttggtgttctctgcaatggtcttgacctattttccaaaccttccccatgactctgtgagctccacgagggtcgagaggcgctccgtctgggtccgtgatacccaagcctggcacacagtaggcgcccaataaatacaggaatgaaaggcccgctgctgccccaggttggtttttcttccccaccaatccagttgctgggaattgaggctttgggggcagccaggcccagagaggcctagggacctgcccacggtcacacagccacgcgctccagctgggagctctgtggctgcctttgcggggggccccgagtcccagggttgggcaggcctagggcagggtcgcccgccccctcctcccgcggtgctgcgggggaacccaccattagccacgcgggcccggcccagcgtgttccccgacaggcccgggcaggcccagcaggggagtgaggggattgcggggagtagggggagcgcagggagcgtggggaccgcccctccccgggacccgagaagggggtgtaggagggaagaggagggggaggaggagagaatggaggaggaaacggagggacaaagggggaggcggcaaaggggaggggaggggagaggaggggagaggaggaggcccccgggtggaggggaccctgtggaggggcagggaggaagggggggcggtgaggtgcgggggaggggcagaggggcggaggtggcgggagagggagggggcggaggagggacgggctttcaggcctggcaggctcccagcaactgcgggaggggtaagggggcctgggaggacggtgggcctgggtgggtgggagaggtttgcagggggaggtcagcggctgggggcgggagcggggacggggatggtagggagggaggcgccaatgaagagatccagggaaggttaggggacccaagctggagactttgaaggacagagggagaagcccagagatggcagaaagagggagacgagaccatcagagacccccgagacagagggggcgaggcgagggagattgttggataatctgtttcaaacctgagttctatttgcttcatattaggggtttgtcccttctccccaagtccccagagatcctatgtagaagctgttctcattaagcaccaaacagttaagtccattctccagtactagctcggaagtcggtttcatattcgacttaacaatttaaatgaaaggaaattttttttaacggcagtggggacttggagaaggagggggacaaagacagacattacccaggagagaaagttagaggggaatcctaggccctcagaggggaaaccaggcaggggcggtttcagctcccttctctagtttttaattaatttattttttattttttagagacaggggtctcactgtgtggcccaggctgctctcaagctcctggcctcaaatgatcctccctcctcagcctcccaaagtgctgggattacagccatgagccatcttgcccggcacagctttttgttttttgttattgctttgagacaaggtctcaccgtgtcgcccaggctagagtgtggtggcaagatcacggctccctgcgaggctcaagcaatcctcccgcctcagcctcccaagtagctgagaccacaatcgtacactaccatgcccggcctggcctcaagcaatcttccagcctcggcctgccaaagtgctgggattataggcgtgagccatggcacccggccccttctgcagctttttttttttttttttttttttgagatggtctcgaacgcctaacctcgtgatccgcccgcttcagcctcccaaagtgctgggattacaggcgtgagccaccgcgccatgcctggcctctgcagcttttaatatcagaaaacatctacctgggacctgcatcatgggtcgcacctgtaatcccggcagtttgggaggccaagacgagcggatcatttgaggtcaggagtttgagatcaacctggccaacatggtgaaaccccgtctctactaaaaatacaaaaaaaaaaaaaaaaattagccaggcatggtggcgggcgcctgtagtcccagctactggggaggctgaggcaggagaatggcgtgaacccgggaggtggagcttgcagtgagccaagatcgtgccactgcactccagcctgggtgacagagcgagactccatctcaaaaaaacaaaacaaaacaaaaaaattagccaggcatggtggcgggggcctgtaatcccagttactcgggaggctgaggcaggagaattgcttgaacccagggggcagaggttgcagtgagccaagatcgcaccactgcactccagcctcggcgacagagcaagactctgtctcaaaaacaaaaaacaaaacaacaacaacaaaaatacaaaaggtagccaggcgtggtggtgcatccctgtaatcgcagctgcttgggaggctggggcaggagaatggcttgaacccaggagacagaggttgcagtgggccgagaccttgccactgccctccagcctgggcgacagagactccgtctcaccaaaaaaaaaaacaaaaacaaaccaaaacacctaagtggcacaggggcctcctcgtgactttctgcctcagtttcccctccagcctgcccccctggtgtcccatggaggatctcgataatcgcacatctgggtgtgccgcccctttgctgctcgaacaccatccatggctccctatgccccagctcctggcctgtagggcaggcaggattctacagggctggcccacatccacccatctcactggcttctctgccctttgctttttagagaaggattcccgctctgtcgcccaggctggagtgcagtggcacgatttctgctcactgcaccctccacctcccgggttcaagtgattctccttcctcagcttcctgagttgctgggattacaggtgtgcgccaccacgcccggctaatttttgtctttttagtagagatggggtttcaccatgttgcccaggctggtctcaaactcctggcctgacgtgaccctcctgcctcggcctcccgaagcgctgggattacaggcgtgagccactgtgcctggccttcactgccattttctcactttcttccctaatcgctacacacctactgtgtgccaggcatgattctaggccccaggatctatagtagaaacccaaatcagacaaactctcttcgccaaagtcatattagagtggagaaaagcagtggacaagagaatatttgttgggataaattgtgcggagcaaaaaatgctgtgaagataaagaatgcagggaaagccgggcgcggtggctcatgactgtcatcccagcactttgggaggccgaggtgggtggatcacttgaggtcaggagtttcagaccagcctggccaacatggcaagaccttgtccctacaaaaaaaaaattagctggatgtggtggtgtgtgcctgtagtcttggctacttaggaggccgacatgggaggatcacctgagcccgggaggttgaggctgcagtgagctatgatagcgccactgaacttcagcctggttgcccaggtgagaccttgtctcaaaataataaaaataaagaatgcaggaaaaagtgattgtgatggggatgactgaagtaggaacagcgtgttccaggcagagggaaaggccctacctgggaccatgcgtgaacaccttcagccacagggaaggtgccaggaagggtcagactgaggcagtgactacggggcaggggtcgtgagcctccaaggtcagccctgcctcagccaatcctgctgcaccccaactctgcctggaatcggtctttcaagtccttcctcctcccccaccagtcagtgagtccagaaacttctttctcttaaaccaaatggttaagatcctggctgggtgcagtggcttacacctgtaatcccaacactttgggaggccaaggcgggcggatcacttgaggtcaggagttcgagaccagcctggccaacatggtgaaaccaccccccaccccaccccgtctctactaaaaatacaaaattaaccaggtgtggtggcgggcgcctgtaatcccagctactcgcctgtaatcctgaagcaggagaatcttgggaggcggaggttgcagtgagccgtgattgcaccattgcacttcagcctgggcaacaagagtgaaactctgtctcaaaaaacaaccaatcaaatggttaagatcctgaatttcctgcatttgaatccagattccctggctctgtgaccacttagagcctcagtttccttatctgtaaaacagaccctccttcagagagaatcctttgagagatccaattttcactgtaccactcaagcactgctggaggcgtgatagatgttcaggacaacacagccggtattactgttgttatctttatgatatctttgccttcctaattagtctggttgcccctaggggggcaaagaggtccctgagcagccagcaggagactcagctacagccctgacttattcctgcccttgagcaatgttctgatgtccgtgggcctcagttttcccatctgcaccatgggaagagagcgggatcatttctagctccctaattccaccagcactgcaggtgcagcttttattttctcccccaagactgcctgaagggcacacagagggacggagaaggctcagctgcagacaattcagccagcgcaggcacctggccggcctgactgtgaatgtctaatgcgtcctagctttagctcctattccccgctccttttcctccacccctccccgcccccaaccgggctggggatggggaagggggattctgtaagtgctcccaccctctgctggaggccagagcctggccctttggggtgcagatggggggaaatggaggatttcagaccccggagtccccagtcccctgacagacacccccccaccccccaccccacctccgctagagtcctgccaccggggcctgtgggattctcctccctccactgagaaccattgtgtggatgggggcaatcgaggcccagcgggcaggggatctcctcacctgctggaacgtccctcagaatgggggaggggggctgggagaatggtggggtcggagaaggggagagccttggagaaggggcttccagaggaaacagggtgttagagcgggagaggtaaccagaaaggaatatgggcccaccccagtcctctctgctcccctctggtcccatccaaggagctgggagcatcgctgtgcctccccctcctccctctcctcctccccctcctctgcctccccctcctcctcccttccctccctccttctcccccaccttcctattcttccctcccttcctgctattttctctccctcctccctcccctcagttttctccccacgcccctccctctccctcccctccctccccctccctccacttccctcctctctctcctcccctcctccttcccctctccccctcctctccctacccccgcctccccgctgttctctcccctcccctccccctaccctcccccgtcctccgcctcattaggcgcggccgcggcgcggggcccattagccgatcaattagccgaggtcgcccgcggcgcagtcgttaagcgcggggcggccgcggcggggagggggctcggagcccgcgcctccgcccgcccgccccggcttcccggacccgagcacgcccccccaggacgcctcctgccacccgccccccagcgggccccgggaccctccccaaaccctgcgggggcctgggagacccccggatcgcaggccaggccgtggctgagtaggcaggaccccttcttccgagaagaccccttgtgggggtgtcgggcttgtgacccccccccaggcatccttctgctgccagcaacatcaatatcagtaatacttactattgttattattattattactagctgacactcttgagcccttgcagaagttctaattctcagtacaattttccagaaattgagatcagagcgtgacttcacttgccccgaatcacccctaagggtcggagatgaggagccccaagtaaatatgttggcattcctgcagttctttctatgtgtagatttcacacacaaaaacgcaacccacactccccgttccccgttctcctccgcctagtctttctctatcgacacacccgctgacacgccgtatattttacttgtttatctgttcaccccagccaggagggcggggctttctgtcttgttccctgctgggcctctgggactcagggtagagtctccacagacgaatgaatgggccgggctgcggtgtctctcgcctgtaatcctcgcactttgggaggccgaggcgggcggatcatctgaggtcaggagttcgagatcagcctggccaatatggcgaaaccccatctctactaaaaatacaaaaaattagccaggtgtggtggcgggcgcttgtagtcccagctacctcgggggctgaggcaggagaatcacttgaacccgggaggtgggggttgaagtgagtcgagatcatgccactgcatgatctgggcgacagagcgagagtctgtctcaaaaaaaaattaaaaaatgaatgaatgaatgcaccagcctctgctgtgagcactttccttggattaaaatggggtcttcctaacaaggatcggttctgtgattatacccattttacagatagagaaactaagccccagcgtggtgaagccacttgcctgaatcaaccagctgtgagaggaagagccaggatttaaatccaggctggacactccatgccgaggaacatcctaggacacctgtgccacttctgtgacagctgctgatgccttttgcactcagtttttttttttttttttttttttttgagacagagttttgctcttgttgcccaggctggagttcaagggcatgatctcggctcacttcaacccccacctcccgggttcaagggattctcctgcctcagcgtcccaagtagctgggattacaggcgcacgccaccatgcctggctaattttgtatttttaatagagacatgatttctccatgttggtcaggctggtctcgaactcccgacctcaggtgatccgtccgcctcagcctcccaaaatgctaggattacaggcttgaaccaccgcgcccggcctgcttttgttttttaataaagacagtgtctcgttctgtagccaggctggagttcagtggcgcgatcatggctccttgcagcctcaaactccggggctcaagcaatcctcccgcctcagcctccagagtagctgggactacaggcacacaacaccacgcctgactattttttggatttttagtagagatagggttgtgccatctcagccaggctggtcttgaactcctggcctcaagtgatcctcccaccttggcctcccaaagtgctcggattacaggcatgagccactgcactccgccttatttttattttttgtagagatgatgtcttcctatgttgcccaggctggtcttgaactcctgggttcaagtgattctccaatctcagcctcccaaagtgctggggttacaggtgtgtgccagcgtgtctggctggactcagggtctttgtgtgggaactggggtagggatgttgcgaaacccaccctgcttttggtgggtgagagtcagaggaggccttcagaaaagtgacttctagggagtctcagagaattagaatgcctgggaggggaaataaagagaaccctgttccaggcagagggaacagcatgtgaaaaggcctcaaggcaagggacagcaagatgtttcaccttggctgcagcctgttgagtaggagtgaaaggagggatgggtagggtctcctgggccgaggtgaagaatttcgaattaattccaagggcagtgagagccaaagataatctttttttttttttttttttttttgagacagaatctcactctgtcagccacgctggagtacagtggcatgatcatagttcactacagccttgacctctagggctccagcaatcctcctcactcagcctcccaagtagctgggaccacaggtgcacaacactatgcccggctgattctttttttttttttttgagacggagtcttgctctgttgcccaggctggagtgcagtggtgcgatctcagctcactgcaagctcctcctcccgggttcacgccattctcctgcctcagcctcccgagtagctgggaccacaggcgcctgccaccacgcccggctaattttttgtatttttagtagagacggggtttcaccgtgttagccaggatggtctcgatctcctgaccttgtgatccacccgccttggcctcccaaagtgctgggattacaggcataagccaccgcgcctggccataattcttatatttttgtagagatagggtctcactatgttgcttaggctggtcttgaactcccagcctcaagcgatcctctcaccttggcttcccaaagtgctgagattacaggtgtgagccaccaggagcagcctatcttttttcatgactgtgtagtattctgctgtgtgaccatgtcacaatccatctatttgattgggggcaattatgacaaattacagcagctctaaacactcttgttcaggtctgtttttttgttttgttttgttttgttttgtttgagatggagtttcactctgtcacctaggctggaatgcagtggcgcaatctcagctcactgcaacctccgcctcccgggttcaagcgattctcctgcctcagcctcctgagtagctgggactgcacggctgccaccacacccgactaatttttgtatttttagtagagatggggtttcactatgttggccaggctggtcttgaacccctgacctgaggtgatccactcacctcggcctcccaaagtgctgggattacaggcgtgagccaccgcgcctggccaattgttcgggtctttttgatggactcatatgacatttccgttgggagatggatccaagaggggaattgctggattatgtggtgccaagtggccttctgaagtagaggtaagagtttacccttgctggccgggcgcggtggctcacgcctgtaatcccagcactttgggaggccaaggcgggtggatcacgacgtcaggagatcgagaccatcctggctaacatggtgaaaccccgtctctactaaaaatacaaaaaaaaattagctgggcgtggtggcgggcgcctgtaatcccagctacttgggaggctgaggcaggagaatggcgtgaacccgggaggcagagcttgcagtgagccgagccgagattgtgccactgcactccagcctgggcgacagagcaagactccatctcaaaaaagaaaaggaaataagaagaatttacccttgccaaggggtgtgcctaggcgtgttcaggtttcaacaagggtaaatgtcagcaggggatgatcccttgcaactggcatttttagaggcactttggctgcagtggagatggggtgggacctgccaggaggctggtgtgatcagccagccctgtcccctccactcccagccctctcctcagggacatgagacattttccccaatgtcggctgtccatctccacccttgtcagctcccctcagctcggacttcctcctgccgtgaagtccctccagagtagaaatggccatctcccatttgctgggtgggcagcaacatgttcccttggcccaagtcccagaggagccaggggctgaggccaagatgggaaaactgggggcaatcccctttccttctggcttccccacggctggtgcagcttgggtgaggcggtgggggttggggggcttctggctgttccttagaggatggaggctcagctggggcgagtcagtgttctctctgagtatactggccaggcacgggggctcacgcctgtaatcccagcactttgggaggctgaggcgggaggactgcttgagcccaggagtttgagacctgggtaacatggtgaaacctcatttctacaaaaaaaaaaaaaaaaaaaattatatatatatatatatatatatatatatatatatatatatatatatatatatatatatacaaaagattaggcgagtatggtggtgcatgcccactgtcccagctcaggaggctgaggctgaggtgggaggatcactttagctcagggaagttgaggctgcagtgagctgtgatcacaccactgcactctagcctgggcaacagagtgagaccctgtctcaaaaaaacaaacaaacaaacaaaaaaaacccacccagaaccgaaaagaagtgtacctgtgtgggcactggggcctcctctttctctaagggaagagaatgtcctttaggtcttcagatctcgggtgcagaaatcagctctgccactgactcacttattttattattaaaaaaaaatttttttttaggagatggggtcttgctatgttgctcaggttgtccttgcactcccggcctcaggcaatcctcccacctcagcctccccacttactagcttagggatcccttcgcctttttaagcccccttaactgcctgtctaaacatcaaccacctgggccatgctgtgtgacctgaagtcttcagctcaccctctctgggctaggcatcagagcagtgtaggccaaatgcagaagcgtgacccaccaactctttttttttgagacagcgtcttgttctgtcgcccaggctgaagtgcagaggcatcatctcagctcactgcaacctctgcctcccgggttcaagcaattcttgtgtcccagcctcctaagcagctggaattacaggtgcacgccaccatgcccggctactttttgtattttttttttttttgagatggagttttgctcttgttgcccaggctggagtgcagtggtgcgatctcagctcaccgcaacctccttgaattcaagtgattcttctgcctcagcctcttaagtagctgggatcacagttgcccaccaccacgcccagcttttttgtatttttagtacagacagggtttcaccatgttggccaggctggtctcgaactcctggcctcaagtgatctgcctgcctcagcctcccaaagtgttgggatgacaggcgtgagccacaccgcaccgggccacagctaggaactcctgatgttctaggaggatgtctcacattggaaggaaccccgtcctcccccgggggcagccacaacacagaggcagggacacagcaccgaagcttctcacatctttattggaaaggcacagctaagcccacccttgatacagcattttccacttctctctgtagagatcagacgattgaacacgagataagctgactatatacagacacaggtgtgggtgttgcttttttttaaaaacacttttgtctttttttttttttaatatcccctttcttaaaagacaagctagtatactggaaaaagaaaaaaataataataaaataaaaaccaagacaactttagtaccctcatctttatttgggaaggggagggggaatcctgggtcgcccaccctcaccctgctcctcccagctcagctaagctcgtccctcgtgcccccccttttgtgggcgatgggagaggaccaggtgggcgtggaggtgtctggaactagcagaggtggtgagtggggcaggtggaggtgggagcatacctgggacccggggtcgggggagactcggggtgcccaggacgggaaaggggcagctagcattgcgtgcatgcagtaccagggtgagagggctgtggcccaggcagactgtcggttacacatgttcaaaacgggggaagggccggggctgctgcgcttcgcgaggtcttgctcccttgggacctggtctcccatctgaccctccaggccttagcttgcctcacatgtcagggcaggtatccacctaaccaggctgcaggggaggaggagggaagccgggaatggggtaggaagaaagctagaggtggcctgcaagctgggctggggcccccgccggcggccaccataaatactatgggagtttagccaatcccgagctccgctgtgtcttgtgctaaacattcctttctctccgtgcctctgtctcccctctgtcccccctcccaacctccctgtcccggccccctgctaatccgacttctcgccatcatcctcctggtgggtgtcaccatcgtgcccgttcttgtcttccttggagaggtgggcctgggaacccagcgcggacagcgagaggaggccggtgcctgcgctgaccgccggcagcgaaggcggctgcagccccacgggtagtggggtcaagggcagggccagggcctgcagctgggacagctggtgggcttggagctgctgctgcagggcgggggaggggaacattagctgcctggggcccacctgtcccccgcccacccgcccaggtccccatacatactcggatgatagagttcagctcgggagcggtgacctgcttggccctctcaatggctcccaagacctgctgctggtgctggaagggggtcgggggagaggagaggcagtgattcctcctgatcctgggagaggagagggggacggccctgaggccaggaggagccccactaccaagtgggccatcatgtctgctcctcccagtggttttcaaccccatcagaaagcaccctccctctctccaactgcttcctttcaccaagctcgtctcttcgtctggccaacagagacaaatggaaaagtgcagaaaacaattaaaagggttttgtgctaagtagttaggaaacagcttttgagtgagcccgggagaaaccctggatcctgacctatcctatgtgcacagccacctgcaaagatgtgaaacatgtgaatgtttgtgcagtacacaacctgcccaactgtacagggacgtcctgatcctaggagctccaagactgtgccctgagtctggccaaattgagcccttctcctaccatggctggggagggcccaatgaattctggcagggctggctggggaatgggctcagattcagggcagttcctccctgagctctccccaaacacctgactctgtggccagcagatgctagaatctaccaatctccctttttgccttggctaccaggaagcctctgttctgaagggctccaagtgcccttttctctagggctttcattgggtcctgctaagacttgtccctgggcaaagcagggcacccaaaggatcctgagatacccacagggattgaagaggaagttacaaacttttgacagtaaacttggcagggacaggagatgggccttacatggccctggggaggggcggcctcgcatcctgagcctcagaacccaagaaaggagaagaggagctgggcgtcaggttcatctgggtgtgtgtgtgcatgtggtaatgtgtgctcaggatcacgtgtgcccacgtgtagctgcacattcctgcatgcgtgtccctgtgctgtctgcacacacgtgtatccgtgtctgcatctgtgtatctcccgtgtgttgatgtgctcgtgcctatctgtgtggctgtgtccatgtgtgaccaccctgtgctaccccttcccccacaatcccctaacaccctctagtccttggtcctgtgcagcccgcatggcctggaggaggatgtctcaagagggtgaaaggaggaagagagatgagaaaaaaacattcctggtgcagtttaggcccatctgacatttctacctatgacatgactcactccagctgggaattccagagcagggtgaggcccgccccccacacgcctgcacccctggagtgtctctggcccggggattcttctgcacaggccggctctggtgttcagagccagggaggtccagagaggggaggcgtgtgccctggggcgcccagcacaccacccaagatggctgcagtggacaggggctgggcaagtgcggggccccctcacaacccctccccaaggccctggctcttacctcttgggagaggtagggcaggacctgggcacaaatcccgttcagccttttgacgatctcagcctggaacacacagatgaagccggcttcagtcctgggcgggtggcaggtgcaggctagccacaggaggcctgcgcggggcccggcccagccctgccacttgcggcttctaagaggggctaggtctggccagggtgggatgagcaaagccgtgttcgggcccgagggcagccagtcagtggcaaaggtggggctggacaccggctgtcgcctgcagcttagagtgaggtaagtgcaggatgaggccagactgcacattcctcgggggtcggccactcaggcccctggcaggtagtaagcgcttgtgcgaatgtagggagggctgggggccgtaggctgtggggaaggtctctgcccctccccaccaccgggagaaacactcccagggaggcctgaaaaagaggcggggcgggggggaggagagcgggagcttggggagggcttaggaggtaacaggataaccgggctggcttggtgcccagccgagggccggccgctacctgcctgggggtgcccaaggcggggctggaggtggggggaggagggggaaggaggaggaggaggaggaggaggaggagatgggcgtacctgtttgtgcatctcgatgttcaagccgtaggacatctcgtagtactgtatgggggagagagagggggagcgggagatgggggtggggaaggatggggggacacggagacaaagagataggggagtggcagagacagacaaaggggggagacagcaagagacagctgagggcaggaaagaaaggagaggcaggtgggagggaaagaggagggagagacgcccacacccagcatcccagcccgccctggagaggggcagggggccgctggggctgcggatggagactgggggcactttaggtccctagccctggcctggctcctcccccactccatgtgcaccgcgagaacacgcattccagggctcctaatcttgtatctttctatgtcttgtctgcgggtgggcccagacgccagggaagtttgcctgcctaggtataaacagtgaggggtaaacaaagcctgctggctctggggccagcagctacccccaccccaagccccagatctcaccctgcccctcccctgctctaaaccctcccatggctccctgtcacccctgggggaaaaccaagttcattcccaggccttcacgtagtttctctgtctctgtctggtgaactcctactcatcctgcaagaccccagctgtgtgccccatttctccatatagtcttcctcaggcaggtcctaggtccctctctctgaccccagccctattcttctggctgggagggtcagggtctggctctgcctcccccacagtctgggagatttgggtactgggctgagaccccagcatcgctgctcgagggccaggccaagggtgggtaagggaggggatttttgatgcagaaatcgtcacctggcagttacaaaaccgagcaagtggttctggcagcagcaatgcagtgtcacacatcagccccccgaaatgggtagggctcagaccccctcccacaggcttcttctttgagctcgggcccaaaggggttaagcgtgtggacgctgggaccttggcggtggggagggactcggctgctcccccacgtcagttcctggctgttggctttcacagccggtgagcctccctctcctccctcctccgctgccaaggacagccgggggacctggcagggccggtctgcaacccggcggtttggcacctcggccactgcctcggccatctgccaggctagcgaggcaggctcagcccagcaggggccggctgaatggagaacaggccccgatcctcgcgcttcccaggggaggtggccggggttgagggagcagctgcccgtggtggaggggatgtggagggccctgtcgcccgcccccaacactggacctgggggcggagtgacgttaccatcacatagtgacgctgcatctctgacttctcactggccaacttgtcacattcgagcttgaggctgaggaggcacaggggggagatggggtggttagtggcggctgggcgggagccccccaccctccgttatccaggggaggaaactgaggctccaagtcccctgtaagggcaagatcagccaattctcagagggtcaagcaataattttttttttaaattgagacgggggtctccctatgttgcccaggctggtctcaaaaactcctgggctcaagcaatcctccttcctcggcctcccaaagtgcttggggttacagatatgagccacccaccgtgcctggtcaatgaagccgtaaactttcataggggctgaggacattgaattgaggggcagggaagttggtaagagttgagctctctgtgatgctgcggggaggggagagcatcagggcccctgactgtaagaagggggtgatgaaaccacccttgcagatctggttggggggaaataagcaacattatagtaacattataggaacaacagaagttagagggggcacggtaacgctagctctgagagtctcacgagccttcacctctcacggtcccgacgaggcccgcaacgtcattgtcacgctccttttatagatgacacagtggacacccagagagggtgaggaactggctcaaggtcacacagccaagcagcagcccaagctctcaaccacaggggaaaattttccagacccaaatagaacgtacaaagaggctgagagggtctggggctgcaaggcggctcccggctggacttcccaaggggaccctagcttcatggggggcctggacttcccaggcagacccctcagctccctcttagtccttcctaacagccttttttctttagctgggacaaaacacaccatttctcccactccacctggccagtccgggtggctgacaccagagcttcctacaggccctcccgggaaggatgagctgtggggcgtttctcaaagcccccatgagggcgtcatggccggagggaagagagcaggcaggagggcctcccagtccaggaaaagaactggtgatggtggtgggggaggtgtcctttaacctacttaaatccaacccagcacaggggccctgcggacctggctgtggcttacctgcttctgccatccccaccccctctcggactgggttcaaagctcagcccttcgtcttccctgctgtgtgactctaggcaaactccactacctctctgggcttcatttcctcctctgtgaggtaccactaacaacctcgcagggtggggtggagaagagtcaatgaattcagacaagaaaagttctagaacagtacctggcatacagtaagcatcccataaatgcacatggatcttaggataccccaggaacctggcattttgctccaccggagaagagtgtgccgggttagggatgctttggccgccaccaatttttctctagttttcttttaaaatgtgcatttgttgctaccattaaaaacaaaaacaaaaacaaaaaaaaaccggggctgggtgcagtggctcacgcctgtaatcccagcattttgggaggccaaggcgggtggatcacttgaggtcaggagtttgagaccagcctggccaacataacgaaagcccgtctctaccgaaaatacaaaaattagccgggtgtggtggtgcacgcctgtaatcccagctacttgggaggctgaaacagaagaatcgcttgaatcccaaaggtggaggttgcagtgagccgagatcgcgccactgcactccagcctggcgacagagcaagactccgtctcaaaaaaataaaataaaataaaaaagaagtttcactccaaagcctgcatttctggcctttcttgaaaaataggatggtctggccacccaggggctgttacgcctcgaacatccggtgtgtgcctctgatatggtagggtccctcgttggacagcaggaagcccaggcccagcggatggagaccccaaagctcagagagggcttccggcttagcagaggtcacacagcactgtgaccgccatctgatcccttccctgtggaatcaggtcagccccggggctcaccaggcggtatccaacccttcatatcgaggaacccgcacaaaagcttctggggcctgcatggaaagctgactccagcaccttcgactgtcagtgtctcagtttgcccagcttgagaatgggtacgacagtcggacgacaggaaggatgaagcacgaggaggcacgaacggtcttgagcacacagggagtacccaaaaaggtgggatatttgcagcagcaacaacaaaatcgagattcccctttctacttggaggaaatccaggatccttccaggaacacttctggggtgggcacgcttcagtttagagagggccccaaggccaaacgggggtttgagcatagcctgactttctccagattcccaggcccggcgtgcccctccagagcagggcaggcgagaacctatatccttaaaccaggagagagacctggtgcaaacctcagccttgccacttcctcaatgctatggacacccccgaggaaataacatcataacatctctgggcttaagtttctttttttctttcttttttttttttttttttttttttgagacagagtctccctgttacccaggctggagagcagtggctccatctctgctcactgcaacctccgcctcacgggttcaagcaagtttcctgcctcagccacccgagtagctgggattacaggcgcccgccaccacacccagctaactatgtatttttggtagagacggggtttcaccatgttggccaggctggtctcgaactcctgacctcaagtgatccaccttcctcggcctcccaaagtgctgggattacaggcatgagccaccacgcctggcctgggcttaagtttctttaagtgtaagaggactaaatagttccttccccttagataccgcagcgtggcaagctcttcagaaacgccagatttctgaaagaagcagcaccttggagaatctgacgggtgctgggaaccctttctccaaaactgggcaaagagagagatgaccaggctgcagaatgtttctgttttgggggttgagggatggcgagtccgtgccgtaactccaattgttggaaggtcttttatccaatgggggacttgggggtattggggaggagggaggggctctgaagccacacagctgaatctttgggcaaattatttaactatttttgtgcctcggttttctcctctacaaaatggggctgtttaaaataaatgaattcagtatttgtcaagtgattaggtcagagtctagcatatattattttcccaatctccaggcctcagccttgccatctgcgcagaagaaatggggggactcacattctcgggacgcagggacccccagtcccccagctcacctgtggtactgagcttgcagtagctgaaattcgtctttgatgcggtcgcaggagtccgaggtggtgaatttgagttgctggggtaggtgcgaggagccctgtagggatggggcggcccgggtcaggcccaggcgtgggctggacccccctcaagggccggctaggagggagcggccgcgcagctgcggcgccccccctcctgccccacttcctgggcccgtgtttacggcccctggcgcgaccccacccgcgcttcctgccccccgcctctcccgggggaagccgagcgggtgggtgcgcccggagccgccccgtcccccgccacccccaggcagtgggggtgcgttttaaggcccgccctagatggggggcagggtgcgccctctaccgccctccaaagcgccgggagggagtgcacatccgaggggggtagaaacgcgccctagggagccccctccccaagttggggggcagcgattcctccctgcaaagtcctcttgggggaggggtctctctctcggtgctcgaaatcttccgggggggcccaaccccagattcccagcgcccttcctcggggacacgctcttccgggaggggtgcgcctcggatcaccccccccaccacaggcccccaaaggatccccgggctagaggtgcctcgcggggcttccggagcgccccaggcccgaggccaaggccgtccgaggccctgactgtcccggcgggttggggggggggggcgccaagccgggagctgcggcgggggggctcggggcccggaagctggggtggatcgggaactggagggggggtgtccgggggccggcggcaggaggggaggggggtcgcgccgggctgggagctggagagggaagacagggccggggagttggggggggcgccgggccggaggcaccgggcctgggggttggggggcgcggggccgggagccgggggtcgggggcgtagggcccggatccggggtgggggcgccggccggacgggccccgcttaccgaatgcctgctttgtggaaacatcatgtcaatcgcggcggggggcgcgggctgcgccccggctgtgcgccccggctcgggctgctgggggcgccgggcggccgcgcctttgtcccggcgccgatcggcagctcccggggccgccgccgcctcccgcgcccggcctcgcccgcttcctgcgccccctccccgcgcgcccggccccggcgcgccccgggccccgcttcctgcgcgcccggcgcccctccccgcccctccccgccgcccgcctccccgctccccggccccaccgctattgtctaatggcggcgacgccggcagtggccgcggctcggctgctgcggaggcttcggctccacctgccgccgcccgtgccccgtgcgcgccgccgaggggggggacgcgcgcgcccggggaggcctgcggatccccacgccggcccgcctccccgtggcccgcccgccgcggtgaccttgggcccggcccgcccccgccccgggcagcggcccccgccaccctctcctacccggcagccggccgggcctcggtttccccatctgtcaaagaaaagggacccggctgcccgcgtcgaagccgccggccctgctgtggcacgacctggacgcgtgccacggacgtgctctgtgaccttggctctggctgggcggtggttcttgctgagccttagtttccttttctgcagaaaggcagcggtaatgccgccttcctgagggaagccattcttgtgacacatttatagaacgcctactgtgtgccaggccccgctgctccagggccctggggtggggcggggcgggggtgggtccctgccctggtggtggtgcctggagacagacagagacaaattcacaagctgaattcctggcaggtcagatggtggggacagttctgcagaaaaaccagccgggagaatggcagggtaggaaggtgcaaagttaaagaggtgggagggaggatcagagacggcttcctccacccctaaagcgacctgaagaaggagggagaacagggggatggggtacagaggtagtcagaggcaggaccaacaggtgcaaaggccctggggcaggactgtgcctggcagcagagtgcccggggggaggtcaggaaggccggagggaggcagggccgggggcttcgtgcttttgtccagggcccccccaccccacagcagggcttgtgcttgggttaatatttactgctgcattttgagatttctaatcatttttgaacaaggggcctttgagttttcttttgcactgggccctgctaactctgtagctggtgaagcaggccagtccagcaaggacttgtgggtcttggggaggacttgggattttgctctgagtgaggtaggagccctggaaggctgtgggaggaggagggacgggacctggtggttggttggtttgttttttgagatggagtttcgctcttgttgcccaggctggagtacaatggcacaatctcagctcaccgcatcctgggttcaagtgattcctgcctcagcctcccgagtagctggattacaggcacgtgccaccacgccccgctaattttggagttttagtagagacggggtttctccatgttggtcaggctggtcttgaactcccgacctcagatgatctgcccgcctcggcctcccaaagtgctgggattacaggcgtgagccaccgtgatcagctgtttgtttgtttttgagatggagtctcactctgttgcccaggctggagtgcagtgatgtgatgttggctgactgcagcctctgccacccggattcaagtgattctcctgcctctgcctcctgagtagctgggattacaggtgcgcatcaccacgcctggctaatttttgtatatttagtagagacaggtttcaccatattggccagactggtcttgaaatcctgacatcaggtgatcctcccgcctccacctcccagagtgcagggattacaggtgtgagccactgcgcctggccctggacttgggcttttgctctgagtgaggtgggaatcctggagagccgtgggaagaggagggatgggacctggtggcggttattaaaggatccctctctctgccacgcagagaacaggtcccaaagaggctactgaaataaggctatgacattaaggtccccctttggcaggtgcgaaacacagtctcttcatcatcgtcatccactaggcagcctgctcccttgaatgaatgcaattgatttgggccttgggtgttcccatctgtaaaatagacttggaaccccaggctccttaccttggcaggtaagggtgatagccttcagtgatcaagattaataatctttaaagcagtgttttaatatttttattaaaaaaaaattttttttttgaggtggagtctcactgtgtggcccaggctggagtgcagtggtgccatctcggctcactgcaagctccacctcccgggtttatgccattctcctgcctcagcctcccgagtagctggggctacaggcgcccaccaccacgcccggctaattttttgtatttttagtagagacggagtttcactgtgttagccaggatggtctcgatctcctgacctcgtgatctgcctgcctcggcctcccaaagtcctgggattacaggcgcgagccaccacacccggcctaaaaaaattttttcagacacagtcctctgttgcataggctagagtgcagtggtgcaatcatagctcactgcagcctcccactcctgggctcaagtgatcctccgacctcagcatcctgagtagctgggactacaggagtgcaccaccatgcccagctaattttaacattttttgtaagccgggagcagtggctcatgcctgtagtcccagcactttgggaagccgaggccagtggatcacaagctcaggagttcgagaccagcctggccaacatggtgaaacctcgtcactactacaaatacaaaaattaccggggtgttttggcgggcgcctctaattccagctacttggaggctgaggcaggagaatcgctggaagctgggaggtggtggttgcagtgagccaagatcgcgccactgtactccagcctgggtgacagagtgagactctgtctcaaaaaaaaaaaaaaaaaaaagatgaggctagaaaggattaggattttggatttttaagattactactacttggtggccgggtgtggtggctcacacctgtaatctcagcgctttgggaggccgaggcaggcggatcacctgaggtgaggagcttgagaccagcctgaccaacatggagaaactccgtctctactaaaaatacaaaattagcctggcatggtggctcacgcctgtaatcctagccacttgggaggctgaggcaggagaattgcttgaacctgggaggtggaggttgcggtgagccaagattgtgccactgcactccagcctgggcgacaagagcgaaactctgtctcaaaaaaaaaagaaacaaagaaacagagattaatactacttagtaacagccaagccttcaaccaaccgcaacacccttgtttttcctgcagggccctgagagactgcgttcctagactgcccctgaagccagtcctgccgctagcacccctgccaccccacccccactgccgtggggaccagacaccccctctcctgggaggccacctgccagtgtttatttaggcaggcgccttccggtatcagtgtgcccgcccagtgaccaaacagccccattttcgaagcccccacactgtcaggggaagcagaactggacacagataccttgagcacggtgaggtgagggctgggccacccacagggacctaggcctgtgaaggagagagtcattgtgaaatcatcgtttttagaaaataggttttttttctgcatagaaggcagcccagaatggtggcccacactataaataatcaaccaagccacacaggtctgtatgtttttgctccgcaccaggggctgccttaagcactttaacctttaggtacagttgtcacacccattttagagatggggggaaaacaggccggcagggtggctcaggcctgtcatcccagcactttaggaggccgaggcaagcagatcacttgaggatcaggagtttgatactagcctggccaacatggcgaaaccccgtctctactaaaaatacaaaaattaaggcgtggtggtgggcgcctgtaatcccagctactctggaggctgaggcaggagaagcgcttgaacccggaaggcggaggtttcagtgagccgagatcgtgccactgcactccagcctgggcgacagaatgagactctgtctccaaaaataaaaaataaaaaaaaagaaaacgaaaaaaaatggggaaagtgagtcacagagaagtgaagtgacttggccaagtgggtagggggcagaaccacgatgttatcccaggcctttgatcttgaccttgggcctttgagcactctgcagtgtggcttctggccgggacacgatggcagcacgtgctgctgggctgaggagctgggattttacctggagggcactagggagccacaggaggttttagagcaagattcttcagttagcgccatcgcattccaccctgggcgacagagggagactccatctcaaaaaataaaagtagattgcatcaaaatagtgtttatcctgatgacttaggtatttggcatccccttagcttttttatttttttttgagacagggttcttactctgtcacccacgctggagcgcagtggtgtgacttcggctcactgaagcctcgacctcccaggctcaagcaatctgcccacctcagcttctcgagtatccgggatgaaaagcgtgtgccaccacgcccggctaatttttgtttttcatagagatggggtttcaccatgttacccagactggtcttgaacttctgggctccagcagtctgccctcctgggcctcccaaagtgctgggattacaggtgtgagccaccacgcctggcccctcttaagtttgacacctgaaaaaaggacctcactctcggccgggcgggctcacacctgtaatcccagcactttgggaggccgaggcgggcagatcatctgaggtcgggagttcgcgaccagcctgaccaacatggataaaccccgtctctactaaaactacaaaattagccgggcgtggtggtgggtgcctgtaataccagctgctcaggaggctgaggcaggagaatcgcttgaacccaggaggcagaggttgcggtgagccgagatcacaccattgcactccagcctgggcgacaagaatgaaactccatctcaaaaaaagaagaaaaaaaaaaaggacctcactctcaagtacactcatcctggtcctagccctgcctcagtcaaatagcaaagtctgctttttggacattctggcccagatcattcattctcttggggggcaaggggcgtcctgggcactgcagggtgctgagcggtgtccctggcctctactcactccatgccaggggcacccccgagatgttccgcccacaggtgtccccagacatcacccagtgtcccgtggggggcacaatgacacgagaatgagcacccctggcttagagcatggaagaaacagggcagctggtggtagaagattctccccggtagtgtgatgggaggattaggcgagagatgggcagcctgggctgggcccatggcaaagagcttttttggggagcataacaagaacagaatgcagatggcgggagggtgaggaagggcagacagcttgccgcaggagggaatgtgtaattaattggcgagaattggggtttaagcacatcacagtgtctgggtggctgccactgagcccccctaccccacacacataaccccccacccccgtccctgaccccacgtgtccggctcacggtccttcctctccctgggattctcagggccacatctggggccaaggcggggcggggatctgtctcatggatccaatcgtctgagaccaggctcaaggcctggttacaaatgagcgctgggccccgcggcctccagggcagagcctggcgctggcgcgtgatggatggggccgcatggccattaatcacaggccggggaggaaacaggtggccgccgtgcagaagcagggacctccctctgctgggcccgggtggaggtaggactcagctgtccagccctggggttgagctcccggactgctgctacctggccgggtgacgtggggccatgagagctcactgctcaagaccttagggtcaccccactgctactcccaaatgcagcttcagatacttagagagcagttactgtgtgtcaggcatgcttgtaagtggaggttctgagcagtgaccaaggagagaaatccccccactccaccttttggagctgataagcttaaaacttttatttatttatatttttggagacggagtttagctcttgttgcccaggctgcagtgcagtggcacgatctcggctcactgcaacctctgcctcccaggttcaagcgattctcctgcctcagcctcccgaatagctgggattacaggcgtgagccaccacgcctggctaattgtttgtatttttagtagagatggtgtttctccatgttggccaggctggtcttgaactcctgacctcaggtgatccacccgcctcggccccccaaagtgctgggattacaggcgtgagccactgcacctggccccattcttgattgaagtgtcactctctcaatgaagctgccttcagcttccctatttgactgaggcagggctaggaccagggtgaatgtacctgggagtgaggtcctttcttaaggcataaaacttaagagaggcagggtgaggtggctcacgcctgtaatctcagcactttgggaggccaaggagggcagattgcttgatcccagaagttcaagaccagcctgggtaacatggtgaaaccccaactctacaaaaaacaaacaaacaaaaattagccaggtgtggtggcgtgtgcctgttgtcccagccactcaggaggctgaggtgggaggattgctttagcccgggaggctgaggctgcagtgagccaaaatcacaccattgcactccagcgtgggtgacagagtgagaccctgtctcaaaaaaaagaaagaaggctgggcgcggtggctcacgcctgtaatcccagcactttgggaggccgagactggcggatcacaaggctaggagatggagaccatcctggcgtgcgcgcacacacacacacacacacacacacacacgccgggcgtggtggcgggtgcctgtagtcccagctactcgggaggctgaggcaggagaatggcgtgaccccgggaggtggagcttgcagtgagccgagatcgcaccactgcactccagcctgggcaacagagtgagactccgtctcaaaagaaaaaaaaaaaagaaagaaaaaaaaagttaaggggatgccaaatacctaagtcatcaggataaacactgttttgatgcaatctacgtgtttttttgtttgtttgttttgttttttgagacagagtctcgctctgtcgcccaggctggagtgcagtggcatgatctcggctcactgcaagctccgcctcccgggttcacgccactctgctgcctcagcctcccgagtagctgggactacaggcgcacgccgccacgcctggctaattttgtttgcatttttagtagagacggggtttcaccgtgttagccaggatgctctcaatctcctgacctcgtgatccacccccctcggcctcccaaagtgcagggattacaggcgtgagccaccacgaccggcccactttttttttttttttttttttttgacggagtctggctctgtcgcccaggctggagtgcaatggcgcaatctcggctcactgcaacctctgtgatccactcacctccccttcccaagtgctgggattaccggcatgaaccaccgcgcccagccaacaatattttaacaaatcaaaattaatgaaaaaaaatccacaatgaacaaaatatcaaaatgttaaataaaaatcttgcataactcactcagactgcctcctaggcccagctcatagaggcctcaacccatattccgcgtgcaggtcatgaggtcagcgttttccctgctccatgggacacagcactgtctgacgtgtaatgcggtttgtgtgtttactttcttgaatgtaggccccgggaggcagggggtttggtgagtcctggtcacttttgtatcctcaatacctagaacagggcctggctcagtataaatgcccaatagttactgaatgagtgaatgaataaatgaatgggttaagatgacacaccaggttgttgcagaattaaatgagataagaccctggaagtaattagcacacagcacccagttggctcctgacatccttaatctacaccttatggcctgagtacaatgttctgattggccagccctgggtcacatgacatccttgagacaaattttatggctcgagtagaatgctctgattggccagccttgggtcacatgacttttcttttttctttttctttttttttttttttttttgagacagagtcttgctctctcgcccaggcaggagtgcagtggccggatctctgctcactgcaaactccgcttcccggtttcacgccgttctcctgcctcagcctcctgagtagctgggactacaggcgcccgccaccacgcccggctaattttttgtatttttagtagggacggggtttcactgtgttagccaggatggtcttgatctcctgacctcgtgatccacccgcctcagcctcccaaagtgctgggattacaggtgtgggccagcaggcctggcctggacaattacttcctctgagaggccttctctaaccagtcatatggaaaaaacaaaaaatattgttattatatcactctattttattgttatctatttttatttatttatgtttatttaacattttgatatttatttatttttgagacggagtctcgctctgtcacccaggctggagtgcagtggcatgatctcggctcactgcaacctccgactcccgggttcaagtgattctcctgcctcagcctccttagtagctgagattacaggcatgtgccaccacgcccggctaattttgtagttttagtagagacggggtttctccatgttagtcaggctggtctcgaactcctgacctcaggtgatcccccccgcctcagcctcccaaagtgctgggattacaggcatgagacaccgcgcctggcccaatttttgtatttttagtagagatgggatttcaccttgttggccaggctggtctccaactcctgacctcaggtgatctgcctgcctcagcttcccaaagtgctggaattacaggtgtgagccactgcaccctggctgggctgatttttttttttttccaagagtcagggtctcactatgttgcccaggcttgtcttgaactcttggggtcaagcagtcctcccaccttggccttccagagtgctgggattacaggcatgaaccatcgtgcctggcctaattttattttatttttttagtcagtgtcttgggctgtcatgcaggctggagaacagtggtgccatcatagctgattgcagcctcgaattcctggcctcaagtgaccctcccacctcagcccctcaaagtgctgggactagatgcgtgagccaccaggcaggccagctgtcatctttattatctgtcaccctgaaagatccatgagagtaaggagcggactgccttctgcactgctgtgtcccagggcacagcttggggtctggcaaagaatttctactcagtgcaaacatcaggtcttagtgaaatgaaagaatgagttagtatttatttatctggagatggagtcttgctctgtcccccaggctggagtgcagtggcatgatctggatctcggctcactgcaacctctgcctctcctcccgagttcaagcaattctcctgcctcagcctcccaaatggctgggattaaagatgtgtgccaccatgcctggctaatttttgtgtttttttgtttgtttgtttttggagacggagtcttgctctgttgccagactggagtgcagtggcgcgatcttggctcactgcaacctccaccttctgggttcaagtgattcccctgcctcagcctccccagcagctgggattacaggagtgtgccgccatgcctggctaattttttgtatgttagtagatatggggtttcaccatgttggccaggagggtctcgatttcctgaccttgtgatccgcccgcctcagcctcccaaagtgctgggattacaggcgtgagccaccgtgccctgccttaattttttattcttagtagagacagggttttgccatgttgaccaggctgctctcaaactcttgacctcaggtgatccacctgccttggcctcccaaagtactgggattacaggcgtgagccactgtgcctggctgacagtaattatttattatccccatattccagatgaggaaactgtggctcacaaaggggcgatcatggattttgtctgccttcctctccacccccagagctctgtcacacaacatggctttattgaacacttgcacgcctggtcttcgtctagatattagggatacagtgacccacatagctccaaccttacagcctagcaggggagccagacattaataaaatcactatacaaacatatgtggttataatccctcagcaatcccattggctccagctttaccaatatacccagaatccaatcaattcccactaactatagggttaccatcctggctcatatccccatcaacttgttcagtgcagcagtctctcatctcacgtcgtattttttgagtggatgtgacaacggaataacaataacaaaaaaaaaaaaacggaatggcttaagtccatggaactgaacattcatgacattagggctgacttcaggcatggcttgatccaggggctccaacattatcgggatcctgtgtcactgtgcatagctgggacagctgtctcccatggcagcaaacaaacaccgttccccagcagctgtaagctttcatcctcccagctcagcaactccagccaattccttctgcttaattacagcatgtctcaggactcattctcattggccaggcttaggtgacatgacatccctgatataatccctatgttctggctggaatactctgattggccaatcttgggtcacatgacttttccatttcaatctttttttttttttttttttggaggggggagatggagtctcattatgttgctcaggctggagtgcagtggcatgatcctggcttactgcaacctccacctcccgggttcaagtgattctccttcctcagcatccaagtagctgggactacaggcgcatgccaccacacctgtctaatttttatatttttagtagagacagggtttcagcatgttggccaggatggtctcaatctcctgacctcgtgatccacccgcctcggccgcacaaagtgctgggattacaggcatgagccactgcgcctggcctaatttttgtatttttctagagatggtatttcaccatgtaggccaggctggtctcgaactcctgacctcgtgatctgcccgcctcagttccccgaagtgcagggattacaggcatgagacaccacgcctggcctgttgtggttttgagatgggggtctttttatgttgcccaggctggtcttgaactcctagactcaagccacccgcccccccttggctgcccaaagtgttgtgattacaggcatgagccactgcactgggccaaatgtgttttgtttttgtgcttttcaccgtccccagcgcccccagctgccggccttgggagcctggtgttggcaggactgtgagtcactgttggggtgtttaagggcctttaaaaggtgttcccagcatttcccgggggctgtgcactaattaggtgattagtaggctgactcctgcagatgtctccctggggataccgggggactgtggggagcagggaagtgtggctgcctacttggcctgccctccagaggccccattgcctccccatagacacccaaggggtaagtgccagcctcagctttacgacaggtgggctctgtgtctctggacaagtggctgtccctctctggtcccatctatctgctttcccatctatctagtgggctgtgggcatatactatggtcctgtaggagccagagccactattcttgctctgttactcagatacctctaacctctcctcccagcaaaataatcatcccctttatcataaatggctgaggtttaccaaattttctcagagccccagcactgatccaggccttcaaggtaggcgcagttattactactttttttttttttttttttttaaatttcagagacagggtctggctctgtcccccaggctggagtgcagtgcatgatcatagttcactgcgcctccacctcccaggctcaaatgatcctcccagctcagcttcctgagtagctgggactacaggtgcacaccaccacacctggctaattttaaatttttttgtagagaaggggtctccctatgttacccagactggttttgaaatactgggctcaatcgatccacctgcctcggcctcccaaattgttgggatcacatttgtgagccactgtacctggccaaattttgtggggttttttgttgtttgtttttttgagacagagtcttgctctgttgcccaggctggagtgcagtggcatgatcttggctcactgcaacgtccacctcccaggctcaagcaattctcctgcttcagcctcccgagtagctggcattccagctgcccatgaccacacccagctgatttttgtatttttagtagagatggggtttcaccagtttggccaggctggttttgaactcctgacctcaaatgatccgcccacctcagcctcccaaagacctggggttacaggcatgagccacaaaaattgagtccaatctctgctcacaccagagaccaggataaactcccaatgggccagacagcgtaaaccagggggccccagctcctgggactcacctcctctctccctccccactgagggtgtggatttcaatgtgtacagcctcctagacccagtagggcagatgatcatgggacacagagtctcttgggggggtccgtggaatcccataacccagggggtctcaaccagggtgattctgctcccagggggcactgggtgatgtctggggacatttgtggttgtcacaatggtgggtactcttggcatggagtgggtggaggccacggatgctgctcagcaccctgcagtgcccaagacggcttcatcccagagaactatctggctccaaatgtccacagcggccaggggagagacctcattccagagctcgatagccaccaaccatgcatggttacttaggtttacactgagatggatggaaacgggccaggctgtaattaaccccagcgctttgggaggtcgaggcgggaggattgattgaacccaggaggtcgaggctgctgtgagctatgatcgcggccctgcattccagcctaggtagcagtgacaagctgtagatagatagatagatagatagatagatagataaaaatgagatgaaagatgcatttcctcagttgccctggccacggttcaggggctcagcagcccaccagtgaccaccacgtgggacgccacggagctagaatgtaggcgatgtggcagaaagtcctagcgggccgcgcagcgcggagacctccccgggtgcaaacgctccccgccccccacccacgcggcgcccgtgccgccggccgctgttccacggatgcccacacgggggcagtgtgtcatcaggatctcgcgcaccttggctcaggtcgcctgcacctgccctctccccaggagggtgagccaggccgctgggggtttggagacagcagcccctcggcttacaaatcctttgcgagcacctgctgtgtgccaggctgtgtgctgggacagctcagtaaatcagagagtcttatccatgctttctcaccgtggactttacgggagggatggttctctggggtggggctgtcctgggcactgcagggtgctgagcagcgtccctggcctccactcactccatgccaggcgcacgccccagtcgtgacaaccacagatgtccccagacatcacccagtgccccctgggagcagaatcatcctccaggttagaatccctgggttaggggattccgcagacccccaagagactctggatcccatgatcctctgccctgctgaggtcccaggtggctacacacattgaaatccacaccctgagtggggagggagagaggaggtgaatcccaagggtccccatggtttgtaccatctgccccatcgggagcttattctgctttctggtgtgagcagggagcagactcaattttccccccaaataattaactaagagatccccattctagacactgtggacattcaaggctggattgtcctctaggatgaggccgccttgggcactgcagggtcctgagcggagtccctggcatccacccactccatgccagcagcacctcctccaagtcccgacaaccagaaatgtccccagacactgctgtcaatctcttgatcaaggggtgcaaaatcaccgccacctgagaattcctttcttttttttttaattttttttgagacagagtctcgctctgtcaaccaggctggagtgcagtggcacgatctcggttcactgcaagctctgcctcccaggttcatgccattctcctgcctcagcctcccgagtagctgggactacaggtgcccaccaccacatccagctaattttttgtatttttagtagagacggggtttcaccatgttagccaggatggtctcgatctcctgacctcgtggtccgcctgcctcagcctcccaaagtgctgggattacaggcgtgagccaccgcagccggccaaaaattcctttctagtgaatcaactcatcacacatataaatatttatttgtttattttatttttatttagtttttttgagatggagtcttgctgttgtcgcccaggctagaatgcaatggcacgatctcggctcactgcaacctccacctcccgggttcaagttattctcctgcctcagcctcccgggtagctgggattacaggcacctaccactgtaccctgctaatttttgtatttttagtagagacgaggttttgccacattggccaggctggtcttgaactcctgacctcatgatccacccacctcagcctcccaaagtgttgtgattacaggtgtaagccaccgtgcccagcccacacataaatatatttaaattatgaaataagcagttatggccaggcgcagtgtctcacgcctgtaatcccagcactttgggaggccgagatgggcggatcacgaggtcaggagataaagaccatcctggctaacacagtgaaaccccgtctctactaaaaatacaaaaaaattagccgggtgtggtggcgggcgcctgtagtcccagctactcgggaggctgaggcaggagaatggcgcgaacccaggaggtggagtttgcagtgagctgagatcgcgccactgcactccagcctgggtgactaagtgagactccatttcaaaagaaagaaagaaagaaagaaagagagagagagagagagagagagagagagaaagaaaggaaggaaggaaggaaggaaggaagaaagaaaggaaggaagaaagaaagaaagaaaggaagaaagaaagaaagaagcagttatatgaggtgagggagctgtaaacttttcttgaccatcacatctccacccaggtaaaagtgattctcctgcctcagcctcctgagtagctgggactccaagtgcccgccaccatgcctggctaatttttgtattttttagtagagatggggtttcgccatattggccagtctggtctcgaactcctggcctcaggtgatccgcccgcctcggcctcccaaacacacatatacacacatgtactcaggacagaggtttaagtacctgcataaccccaataaaaattgcacaagataactcttcgctctgcaaagcaccacgcactgtgatgtttcctattctacttcatttaaaaaatatatatgggtcatgatccactgaattgatttctccacccacagactgaaaaaaataataattaaaatagcgactgggaatcacgcactccagaaacatccccaggcccttccactgtagaaaaaaatgaatgagccaggcaccaaggctcacacctgtaatcccagcactttgggaggcctaggtgggcagatgacctgaggtcaggagttcaagaccagcctggccaacatggtgaaacaccatctctattaaaaatgcaaaaattagccgggtgtggtggtgggagcctgtaatcccagctactcaggaggctgaggcaggagaatcgcttgaacctggaaggcggaggttgcagtgagccgatatcgtgccattgcattccagcatgggtgacaagaacaaaactccatctcaaaaaaataaattaaaaaaaaaatagtggtagcccggcacggtggctcacacctgtaatctcagcactttgggaggctgaggtgggaggatagcttgagcccaggaggttgaagctgaagtgagccatgattgcaccactgcactccagcctgggtgacagagtgagactctgactcaaaagtaaataaataaatataaatgcctccttctcactttatttatctgtctattttccaaatagattcatggattctctctctctctcttttttttttttttagatggagtttcgctgtcgcccaggctggagtgcagtggcatgatctcagctcactgcaacctccgcctcctgggttcaagcaattcttgtgactcagcctccctagtacctggaattgcaggcatgcatcaccacacccagctagtttttgtatttttagtagagacgagagtttgccatgttggccaggctggtctcgaactcctgatctcaggttatctccttgcctctacctcccaaagtgctgggattactgcagcctcccgagtagctgggactacaggtgtatgccatcatgcctggcagattttattttatttttttgtggagacaggttctccctgacaagcccaggctggtcttgaacgcttggcctcaagtgatgtgcctgccttggcctcccaaggttttgagactacaggcatgagacaccttgccaggcccagaaggaggggtttagaaggagtaacagggatagacaaagttacattgtgtagggacagagctcacactgtgggtagacagttccaggcagaaggcacaggctgtgcaaaggccctggggtaggactgtgcctgactagttagaggaacactaaggagacctgtgtgactggaggaaagggagacagggaggaggggaggacggggaggggctggtgcaggcccttgtgggccatggggcggacttgggcttttcctgaaggaaggtgggagccatggagggctgtgagccgaggagggacaggccctgactcagatttgaattcagttatgaaggccgagtgtggtggctcatgcctgtaatcccagcactttggtaggctgagtggggaggatcacttgaggtcaggagttcgagaccagcctggccaacatggtgaaaccccggctctactaagatatacaaaaattagccagacgtggtggcacgcacctgcagtcccagctactcaggaggctgaggcacaagaatcgcttgaacccaggagaggaaggttgcagcgagccgagattgtgccactgtactccagacagggcaacagaataatgctccatcagaaaaataaatacataaataaaataacaataattcagtgtgactttaacatgaagaggcttctccactaaatccatgtctgcagaaaccgggcacgagctgtccctggctgtgcgtggggatgtctgtggatggtcagacctccctgggctcggaatgggcttgtttcaaatgcagcttcctggggctggctctccgcacagtctaattcagcaaaggcggggcagagtctgagctgtgaccccgtgtcccgggtgtttcccgaatcataagatcagatgagcctgtgggcagaagctttgtaggaggccgtgtgcgtggccagagcctgcagccctgggtgcaatctgttttgcccttacttgggaataagaaactcaacctgctcacaggaggaaatggtttctaatgtttgtttttttaaaagagaaagtcttggctcagttatttgcccgaagccagaattgggataatcaaggagcttaaccaaaaccttcattcattcgttcggatttagtgcatttctttatttatatatatagtttttagagacagggtcttgctctctcgcctgggctggagtgctgtggcacgatcatagctcactgcagcctcggcctcctgggctcaagtgatcctccctcctcagcctcctgagtagcggggattaaggtgtgcactatggcaccctgccagatttaatatatatacacacacatatatatatatatttgagatggagtcttgctctgtggcccaggctggagctcagtagtgtgatctcggatcactgcaacctctgcctcccgggttcaagtgattctcctgcctcctgcctcagctccccagtagctgggactacaggcttgcatcaccatgcctggctaatttttgtatttttagtagagacggagtgatcctgacctcaggtgatctgcctgcctcggcttcccaatttttttttttttttttttttttgagacagagtttccctcttgttgcccaggctggagtgcaatggcatgatattggttcactgcaacctccgcctcccgggttcaagtaattatcatgcctcagcctcccgagtagctgggattacaggtcccaccaccacgcctggctaacttttgtatttttagtagagacggggtttcaccctcttggccaggctggtctcaaactcctgacctcaggtgatccatctgcctctgcctcccaaagtgctgggattacaggtgggagcccggccacaggtaactcttatatccctgttttgccaaaaggaaatggaggctaagggaggaggagtccctggttcaaggtcacagctcaaggtcatggagttgggagggagagcaaggagggagtgtgggaatttgaacccagggattgtgattgcagggtctgtgttgttatctgccccaaaacttttccacatgtgcacagcctccacctggacccagccctatcctccctcagcttgacaagccaagtcctgtctgccctggtcccctcgatgcagggcaggtgagccccaaaattggggcttagcctgggagggttcttggcttcacccaggaaagatttcaagggcaagtggtattagaaagggagtttttttttgttttttttttttttgagatggagtctcattctgtcacccaggctggagtgcagtggcaagatcttggctcaccacagcctctgcctcttgggttcaagggattctcctgcctcagcttcctgagtagctgggattacaggcacgtgccaccatacttggctaatttttgtatttttagtagagtcggggttttaccatgttggccaggctattctcgaactcctgacctcaggtgatctgcctgccttggcctcccaaagtgctgggattacaggtgtgagccacggggccaagcctggttatttttttcagacaaggccttgctctgttgccaaggctagagtgcagtggtgcaatcatagcttactacaccctcagcctcccaggctcaagcaatcctctcacctcagcctcctgagtagctgggactacaggtgcatgccaccacacgtggctactttttaatgttgtatttttagtagagatagggtctcgatatattgctcaagctattcttggactcctgggctcaagcgattctccagcttcagcctcccaaagtgctgggattacaggtgtgcggcactgggcctggccaagcaactttccatgtgcccgttggcctacggaaatttttatcactacgcttatttcaccgatgaagagatggagattcagagagggcaagtctccccctgaaagtcacacagcttggggagggtgtgctggatgagaaccagagagccggactcccagcttccagcagcataaaccacggctgttgttagtatggagtgtaggcgtctgtactgacatgtcttcatttctgttggcaaaatacctaggaatgaaatggctggatcctgtttatttattcaaaataaatataaatagatactgtttatattatttatttatctatctatttatttatttaatattatctttttcagaaggagtctcactctgttgcccaggctggagtgcagtggcatgatcttggctcactgcaacctctgcctccctggttcaaatgattctcctgcctcagcctcctgagcagctgggactacaggcgtgtgccaccatgcctggctaatgtttgtatttttagtagagacggggtttcactgtgttagccaggatggtctcgatctcttgacctcgtgatttgcccacctcggcctcccaaagtgctgggattacaggcgtgagccaccgcgcccagccacttttgtatttttagtagagatggggtttcatcatgttggccaggctggtctcgaactcctgagcccaagtgatccacccacctcggcctcccaaagttctggatttacaagtatgaaccacggccagccctagatcctgtttaaatttttttttttttgagacggagttttgctcttgttgcccaggctggagtgcgatggtgcaatctcgactcaccgcaacctccgcctcccaggttcaagcgatcctcctacctcagccgcccgagtaactgggattacaaacatgcgctaccatgcccagctaatttttgtatttttttagtagagacggggtttctccatgtcagtcaggctggtctcgaactccctacctcaggtgatccacccacctcggcctcccaaagtgctcggattacaggcgtgagccacagcgctcaactgatcttgtttaaattttgaagaatccggccggatgcggtggctcacacctgtaatcccagcactttgggaggccgaggcgggcggatcatgaggtcaggagattgagaccgtcctggcttacacggtgaaagcccgtctctattaaaaaatgcaaaaaacattagccgggcgtggtggcgggcgcatgtagtcccagctactcaggagtctgaggcaggagaatggcgtgaacctgagaggcggagcttgcagtgagccgagatcacgcccctgcactccagcctgggcaacagagcaagactccgtctcaaaaaaatatttttttaaataaagaatctgctagacttttttccaaagtagccgcactatttcacattcccaccagtcatggaggagaatcccagttgcttcctttttttttttgtttggttttagatcaggggttctcgttttgtgtgccaggctggagtgcagtggtgcgatcatacctcactgcagcctcaaactcctgggctcgatcgatcttcccacctcagtctcccaagaaactgagaccacaggcatgcaccaccatgccttactcatttattattttttgtagagatggggtcttgctgtgttgcccaggctgctcttgaactcctgagcttaagtgaccctcatgccttggcctcccaagtagctgggaccagaggcatgtgccaccatgcccagcttgaccattttttaaattttttatttctgagacagagtcttgctctgtcccccaggctagagtgcaatggcgccatctctgctcgctgcaacctccgtctcctgggttcaaacaattcccctgcctcagcctcccgagtagctgagatgacaggcacccgccaccatgcctggctaatttttgtatttttagcagagacggggtttcacctcgttggccaggctggtctcaggtgatccacccgccttggcctcccaaggtgttgggattacaggcgtgagccaccaagcctggcctgatgattttcttttttctttttctttttttaatttttgagacagagtcttgctctgtcgcccaggctgaagtgcagtggcgtgatctcggctcactacaacctcggcctgccgggttcacaccattctcccgcctcagcctcctgagtagctgggattacaggtgcctgccaacatgcctggctaatttttgtatttttagtagagacggggtgtcattatgttggccaggctggtcttcaactcctgacctcaggtgatccacccgcctcggcctcccaatgtgctgggatgacaggcgtgagccaccacgccggctgattttctttatggcaggcaatgagtgctcattttccaccctgaggcctggaggggctggtgtttgggtgcggagggtcctgccccctgactccggagctgtagttctggcaataggtgcccttgcaccctgcctgtcctcagcctgggtccccatcacctttgtcctcgctcgcagctctgtgccaggaaatggccttgttctcaccccgggccctcataaaatccagttcctcaaggtccaggaggccaaggccacaaggaagggaggaggccgtggggagctgaggagggagggaggggccgccaacgccatgaaggcactgctgtgagtgtggactttgtcactctgagcctctgggtggggacgctggagtcagtattcagctccgggttggggcccagggtcaactccccatctctggatgggcctcagtttccccatcttccccacaggaggctttctgtgtcctggcccagttcccggcacacagtaggcactgagaacggaagaccccccatgatgttgttgtttcttttctttctttctttctttttttttttttgagacggagttttgctcttgttgcccaggctggagtgcaatggcgcaatctcagctcactgcaacttccacctccagggttcaagcgattctcctgcctcagcctcccaagtagctgggattacaggcgtacaccaccacgcccagctaattttgtgtttttagtagagacggggtttctccatgttgagtctcgtctcgaactcttgacctcaggtgatccgcctgcctcagcctcccaaagtgctgggattacaggcgtgagccaccacgcctggcctgtttcttttctttctttcttttccccctcccctcccctctcctcttctactttcctttccttttccttcttttctttatttttttgagaaggagtctcactctgttgcccaggctggagtgcagtggcgcaatctcggctcactgcaacctgtacctcccgagttcaagtgattctcctgcctcagcctcctgagtagctgggattacaggtgcccaccaccatgcccagctaatttttgtattttttggtagagacagagttttaccatgttggccaggctggcttcaaactcctgacctcaagtgatccgcccgccttggcctcccaaagttccaggatgacaggcgagagccaatgcgcctggccttttcttttctttttctttctgccagggtctcactctgtcacccaggccggagtgcagtggcacaatcacagctcactgcagcctcaaactcctggccccagcaatcctcccacctcagactcccaaaatgctgggattgcaggcgtgcatcaatacacccagctaatttttaaattttttttctttctttttttttttttttttgagatggagtctcgctctttcacccaggctggagtgcagtggcgcgatctcggctcactgcaggctccgccccctggggttcacgccattctcctgcctcagcctcccatgtagctgggactacaggcgcccgccacctcgcccggctaattttttgtatttttagtagagacgggattcaccgtgttagccaggatggtctcgatctcctgacctcatgatccgcccacctcggcctcccaaagtgctgggattacaggcttgagccaccgcgcccggcctaatttttaaatttttttgtagagatggggttttgtggtgatgtccaggctaggctccaactcctgccctctaactatcctcctacctcagccttttgaagtgctgggattacaggcgtgagtcgctgagcctggccccaactgttgttcctgctccccactggatctcctcccaacaatgcccaggacagccctgcagccaggagggggtttccacggagtttcttttattattattattatctgagactgagtctcgctctgtcgcccaggctggagtgcagtggcacaatctctgctcactgcaagctccgcctcctgggttcatgccattctcctgcctcagcctccaaagtagctgggaccacaggcacccgtcaccaggcctggctaatttttttgaatttttttagtggagacagggcttcactgtgttagccgggatggtctcgatctcctgaccttgtgatctgcctgactcagcctcccaaagtgttgggattacaggcgttagccactgcgcccggtccacggagtttctttaataaatgctcaaggctgggcgcgctggctcatgcctgtagtcccagcactttgggaggccgaggtggggaggtcacgaggtcaggagtttgagaccagcctggccaacatggtgaaatcccggctctactaaaaatacaaaaatgagccaggtatggtggcgcatgcctgtaatccccgctgcttgggaggttgtggcaggagaatcacttgagcccggaggtggaggttgcagcgagccgagactgcgccattgcacttcagcctgggcgagagagcaagactccgtctcaaaaaaaaaaaaaaaaaaaaaaaaaaattgctcaaggccgggtgtggtggctcacacctataatcccagcactttgagaggctgaggcgggcagttcacttgaggtcagcagttcgagaacagcctggccaacgtggtgaaacccatctctactaaaaatacgaaagttcgctgggcgtggtggcggatgtctgtaaccccagctacttgggaggctgagacataagaatcgcttgaacccgggaggcagaggttgcagtgagccgagagcatgccactacactccggcctgggccacagagtgagactccatttcaaaaaaataaaaaaaataaaaacgtaagtaaaaataaaaaagtaagtaaatatccagtctagtacctggcccatagcagacgcccaatcaataatcatcaataaatagatcccatttcaaattgtgacaaagtatctgaaagaaaagaacagcgtgttatggcagagactggttgaggagggaggattgcttgagcccaggagtttgagatcagcctgggcaagctagtgagatcccatctctacaaaaaattaaacaaatttagctgagcgtattggtgggcacctgtagtcccagctactcgggaggctaaggcgggaggatcatttgagcccaggaagtcgaggctgtagtgtgctgagatcgtgtcactgcactgcagcctgggcgacagatcaagatcctatcacaaaaaaaaaaaaaaaaaagccgggcatggtggctcaagcccgtaatcccagcactttggctggctgaggtgggcggatcacctgaggttgggaattcaagaccagcctgaccaacatggagaaaccctgtctctactaaaaacacaaaattagctggggtggtggtgcctgcctgtaatcccagctactggagaggctgaggcaggagaatcgcttgaacccgggaggcggaggttgctgtgagctgagatagtgccactgcactccagcctgggcaacaagagtgaaactccgtcttaaaaaaaaaaaaaaagaaaaggaaagaaagaaagaaaaagaaagaaagaaagaaatacaccctgtatcatggcaggagaggtaatcaatgaataaagaggtaaatacgataatttcaagctgcaaaaagggctatgaaggcaactcaacaggacgtgacaggagggagggcttggagtgggggtggcattagttatggattttcaggtaggacccattggagggggaggtgtttttagccgaggcctgagtgacaatattgggttttttttttcttagatggagtcgtgctctgtcacccaggctggagtgcagtggtgcgatctcagctcactgcaagctcggcctcccgggttggcaccattctcctgcctcagcctcccgagtagctgggactacaggcacctgccaccatgcctggctaattttttgtatttttagtagggatggggtttcacgatgttagccaggatggtctcgatctcctgacctcctgatccgcccacctcggcctcccaaagtgctgggattacaggcatgagccaccacgcccggccatatattgttgcttttaacagagacaggatctcactgtattgtccaggctggtctctaactcctgggctcaagcggtcctcctgccttggccccccaaagtgttggcattacaagcatgagccactctgcctggccaagtgagtgacaatgtttttggccacaatttgccctctggttgtaagtttcacatgcaattggagctttgatctattgaggcgggaactccaggagccccctggctacgtgcagctgaggtgggactggaaccccagaagatgagcttttcaaggagctaatcttttgtccgggtgtggtggctcacacctgtaatcccagcactttgggaggccgaggtgggtggatcacctgaggtcaggagttcaagaccagcctggccaacatggtgaaaccctgcctctacaaaaatacaaaaattagccgggcatgatgtgggggtgcctgtagtcccagttactggggaggctgagatgggagaattgcttgagcctgggaggtggaggttgcagtgagccgagatcatgccattgattgcactccagcctgggcgacagagcaagactgtctcaaaaaaaaaaagtgagctaatcttcccacacacccaaggaactgataaacggagactttgaccctccctttgccctcttatctcaagacaagggagaagggtctatcaaggtgtacctctgaggataagggataggctcctgacatttggaaactgggaagggccaggtagagggaggaggtggtggggaggtcaggcagtgtcaggggctgggagaggcgtggcagtcagcgaagttgtatgcaatggtgcctcagtttcctcctctttaaaatgaatttccagctccaagaacaatctaggctctagtattcatttttagtatcttccctttgtctttttttttttttttttttttttttttttgtagagacagggtctcactatgttgagaccctggtcttgaactcctgggctcaagtgatcctcctgccttggcctcccaaagtcctgggattataggcgtgagcaactgcacctgccttaatttcagtttttgagacagggtcttattctgttacccaggctggagtgcagtggtgcaatcatggctcactgcagcattgacttcttgggctcaagtgatcctcccaccttggcctcctgaatagctgggactacaggcacacgctaccatgcccggctaattttatttcattattttattttattttttgaggtggagtctcactgtgtcgcccaggctggagtgcagtggtgcgatctcagctcactgcaacttccacctcctggtgtgatctcggctcactgcaacctccacctcctgggttcaagcgattctcctgcctccgcctccggagtagctgagaatataggtgcaagccaccatgcccggctaatttttgtatttttagtagagacggggtttcaccatgttggccaggctggtcttgaactcctgacctcaggtcatctgcctgccttggcctcccaaagtgctgggatgacaggcgtgagccaccgtgcccagcaaattttatttttacttttgtagggtgtgtacgtgggggtcttgctatgctgcccaggctggtctcaaactcctggcctcaagcagtcctcctgccttggcctcccaaagtattgggattacaggcatgagccactcttcccagaccaggctttttaattcctttcccatcattccaaacacatcgattgagcacctagtgtgtgttagagcctcattctaggtctctttctgtaagggaccacataggaaatctttgaagagttcttgtaatgctgccctgtggggtaagagtagccacactcagtatggaaatcaatggatgtgactggcttccaacaaaatcctatacatggacactgaaatttgagttccatataatttttatgtctacctaaatattactttcttttgattttttaaaaccgtttaaaaatgtaaaagccaggctgggcgcggtggctcacgcctgtaatcccaacactttaggaggccgaggcaggcagatcacgaggtcaggggattgaggccatcctggctaacacggtgaaaccccatctctactaaaaaatacaacaaaaaaattagccaggcgtggtggcgggtgccgtagtcccagctactcgggaggctgaggcagtagaatggcgtgaacctgggaggcggagcttgtagtgagctgacatcatgccactacactccagcctgggcgacagagcaagactccgtctcaaaaaaaaaaaaagtaaaagccattcgaagcttatggaccatagggccgagggttgtggattgccaatctttgttctaggtgaaccagacaggctctgacctcatggagctgatggccaatttgggaaactgagtctacagagaggcacccagaagaatatataatttctttcttttttttttttggagatggagtttcacgcttgtcgcccaggctggagtgcagtggtgtggtctcggctcactgcaacgtccacctcctgggttcaagagattctgctgcctcagcctcccgagtagctgggattacaggtgtccactaatttttttgtatttttaatagagacagggttttgccatgttagccaggctggtctcaaactgctgacctcaagtgatctgcctgccttggccttccaaagtgctgggattacaggcatgagccaccacaccctgcttttttgtttttttttttttttggacggagtttctctcttgttgcccaggctggagtgcaatggtgcgatctcagctcactgcaacctccgcctcccgggttcaagaggttctcctgcctcagtctcccaagtagctgggattacaggcatgagccaccgtgcctggctaattctgtattttcagtagagacggggtttctccatggtggtcaggctggtcttgaactcccgatctcaggtgatctgcccacctcggcctcccaaagtgctgggattacaggcataaaccaccacacccggcctttttttttttttttttttgagacggagtctcgttctgttgccctggctggaatgcagtggtatgatcccagctccctgcaacctctgcctcccgggttcaagcgattctcctgcctcagcaaaagtagctgagaccacaggtgcccgccaccacgcccgggtcatttttgtatttttagtagagagggggtttcaccatgttggccactctggtgttttgttttgttttgttttgatacagggtctcactcttgtgtcccaggctggagtgcagtagccccatctccgctcactgcaacatctgcctcctgggctcaagtgatcctctcagcctcccgagtagctgggattacaggcatgtgccaccacacccatctaattttttgtatttttagtagagatggggtttcgccatgttatctaggctggtctcgaactcctgagctcaagcggtccacctgccttggcctcccaagtactgggattaccggcaggagctgccgcacctggccagaacatacaatttcaagttgtggctcaagagaaggtacctggcttggtctgaggagtcaggagaagtctccctgaggagctgacgtctgaattgaaacggagaggatgctcaggggttggccaaggaggccagagagggaaaagggttttcagtagtcagcaaggtggtgggaacacacgtttttataaattctggtggccacttccatttcatctgcaaagtaaggataaagatatggctgggtgaggtggctcacatctataatcccagcgctttgggaggccgaggagggcagatcactagaggccaggagtttgagaccagcctggccaacgtggcgaaacccgctctctactaaaaatacaaaattagccaggcatggtggcgcgcctgtaatcccagctacttgggagggtgaggcaggagaatcactagagcctgtgaggcagagggtgcaatgaacctagatcacgcccctgcactccagcctgggcgacagagcaagactccatctcaaaaaaagaagaagaaaaaaaagatatcccttgggtagggttagcttaacgggcttacagcagtgcctggtatcctgtaggcatttcatgaatgcgtatacctggcctggaatggtgcaggcactgcagtaaggcctgattgacacctgatggacagcaggcactccattaatctctggtccgtgcctggcatatagaatgtgtcccattaatgcctgatacacagtaggtgtcccattaacgctttttaatttttttttttgagacagagtctcgctctgtcgcccaggctggagtgcagtggcatgatctcagctcactgcaagttccgtctcccgggttcacgccattctcctgcctcagcctcccgagtagctgggactacaggcgcccgccaccacgcccggctaattttttgtatttttagtagagacggggtttcaccgtgtcagccaggatagtctcgatctcctgacctcgtgatccacccgcctcggcctcccaaagtgctgggattacaggcgtgagccaccgcgcccggccctctttttttttttttttctttggagacggagtttcgttcttgttgcccaggctggagtgcaatggcgtgatctcggctcactgcaacctccgcctcctgggttcaagtgattctcctgcctcagcctcccgagtagctgggattacgggcgtgcaccaccacgccgggctaattttgtagttttagtagagacggcgtttctccctgttggtcaggctggtctcgaactccagacctcaggtgatccgcccgcctcggccttccaaagtgctgggattacaggcgtgagccaccgcgcccgacctccattaacgctttttaatggatgagtgaaggttcctgtcaggcaatgtcagggcgcttcccgggggcagcgactgctgcccaggcacctggagacccagagagcgcagcggccgcgtgcgcgcctccgccaccgcgcctgggccgagccgagcgggaccgagcggggccgaacggagccgagcggagccgagcctggccgggccgagtccgccacattcccacaatcccgggcggccccgccccggctcccggctgcgcgtcccccttcccacgtcggcgcaaccaaacccgcgggccccccgccctcgccccgccccgcccctttcgcgcccgccgacgccccgcccaggccgctagtcccgcccccatggtgggcgcgcttggccgccggcccctcccattggccgcaccgtctgcccgtcgcgggctgcgctcccagcctgctaggttgtccggcgctgtcgctcggttgcggcggctgcggttggcggtggctgcggcggcggcgcgggctgagtgcggccgcgcgggagtccgcggctggcgcggcccgagcggggacccggcggctcgccaggcggcggccgaggcggggcgggccggcccggggccgagggccggtggccgaggccggagggccgcggcgggcggcggccgaggcggctccggccagggccgggccgggggccggggggcggcggcgggcaggcggccgcgtcggccggggccgggacgatgactctggagtccatgatggcgtgttgcctgagcgatgaggtgaaggagtccaagcggatcaacgccgagatcgagaagcagctgcggcgggacaagcgcgacgcccggcgcgagctcaagctgctgctgctcggtgagtgcggcccccgggcctgccggctgcgggccctgccctgcctgtgcctgccctgcctgtccgggtcgggccgggaccctccggggtcagccctgcctgtgccgtccgggtcgcgagaccctccggggtcagccctgcctgtgccttccctgcctgtccgggtcgcgggaccctcgagtgtcagccctgcctgtgccttcactgcctgtccgggtcggggcggggccctccgggatcagccctgcctgtgtcgtctgggtcggctcgggaccctctggggtcagccctgcctttgctgtctaggtcggcacctgggaccctccggggtcagctgcgggcccctgatttctttggggtcagcccctgccttaactgttcatgttggcacctgggactctccggtgtcagcctgtgtctgtcctgtctggatcaggcccccgatcactcctaggtcagctcccagcttctgctgtctacattgggcctccaggactcttcaggatttgccctctgttccttctcaagggaccagtccctccctgcacagggaccttctgaccttaccccaccggagtacccacccctcgctaccccttcagggccagacctttgggctgtaacccacagggcacactcacccctcactgctcagggccccgcgttgacccttccctccaggcagagccctgtacactccatgcaggccctgtaccctccatgcaggccctgtacacccccccatccccccgaagactcctccgtgtcccctatccccacattcccttcagggccattctcctgccttcctgttccgggaaaccccgtactcctcttggctggaatgcaccctgtgggaaaaagacagtctttcctctcctcagggttccgctcagctgagggtggggcggttgacacctgagggagcctttgcttgttgtcccaagcagctatctcggcagcctcccccgcccccttccttagagtcctggtgggagccacgctgagtcctcgttgagagcagccccccacctgccggctcctccccaccgtcctggagaaggtttgctggtgaacctccttctccccaaggcacacctgctgcagggagccagtcgggccagctgtaaagtgttgtcactccaaataagggccccttcagtggtttacaaaacagaagctcttgccctgccccgcccctgccctcccgagctcctaggttagctcctgggccgggggcggggcggtggggaaggtcggaaatgcgtgagaggcagcggtgacggaggagggggcgtgctggtggcggtggctcttggggaggaggcaggtcgcatgttgtgtggggaacacgttgcctctcctgccgtgagcctcttagggccctccgtgtcccgggttacagaggtgccttggatgaaacgccttcctgatttttttccccaaacttgtgttttgatttacctaagggttctaaaatgggccatctttccagggggccgcgggtaggcagagccgtggtcctcacgtttggaggaaatgtgcagtgcggcccgcgtggtggcactttgcacagagtggcactggctggcttttgtagtgggtcgtggactttgtttggatggaggggagttaggaattactggtgtcataaagatcttaccagatggccttgccctgtggctctgtgacctccagaacccccgccgccatccctgcatgcacccggtcttctgtgcctgcactttggacttgagattgacacggggttcaaggacgaaggtcaggggctcccgtgtctgccgccttggctgcttggagcaagtctggaagtgatgcggcccttcccgcatcctctgtccagtgcccgcctgtggcccgggggtgtctgctgcaggagcacctgtgtctgcagtcccaccccctcccactctgtgagcctgaaagttgacccctatcagcctgtaagacgggaggttgctgtcaggctcagggccaggcgtggcagataggacagtgaggaagatgtgagctcacgtgcgacccaaggaggactggtgtcagtgccacgcagagagccggggctgtcagggggttgggagggcttcacacccaaggtgttggagccagggacccctttgggaatctgatgcgacagaccctcagaaaacttcccgtccaagcaaccttgcatcccagctggagggccccttgctgggaggactttgaccacctgaggtccaggggctggggcctcagggtgcaggggaggggacctctgtcaggctccctgcctgcttgtgggaactcattccactctcccagtaggccagccccgagcttgcgattgcccccgtttttcagggagcagctagagggtggggccgaggctccccggaaggaaggggctgttgggctgcagcaggtggctatggcgcctgcggcccacggaatgttcagagacctctgggtggaggtcctggcactccgcaggaggcccagccaagctgggtctgcctctccctagaattctttcctcccctgccccttagcagtgggggctccatccctcctcccccatggctcccgtacagcgttgtggagtggatgtcggggagggaggcaggggcctgccaccacacccctgtggcatctggggcccaggagggtctcgtttatgtgggtggtgctggtttcttccaggctctggggcagcagggctccagggccctgccctgactcctgggtttgcaaccaggtggagcatgttctggaagaacgccgcgtctgctcgctctcatccactgcctccctggggctgcacacggcctgtgaggtcggtcagcctggcgaggacattccgtgccccgttttcggggtgggggggaccttacggagccctagagctggacggggctccggctgccgtgccgcctctcccgcggcggctaaaatgtgctgttcacgcctcagatgggcctctccgttacgtacaacaggtctccccggggccctgtgcacattggtccgggttggtctctggggtggggctgccctgggcactgcagggtgctgagcagtgtccgaggcctccacccactccatgccaggagctcccccaagtcgtgataaccacagatgtctctagacagtgcccattgtcccttggggggcacgttgcccccatttgagaccctttactgtgtggtagcgtacaacgtaaaatgctcgtggcaaagctgagggataatgagtgcaaattattttgtcagaagtttccatgagtgcttatagagtatttttctaagcaccgtcaaagccgtgtgtgtgtgaattcactactcagtgtatgcatgaatgtgaatgcatgtattgttttatacccgtggtattccaggtttgtccctatgcacacttctgtcgatgctggtgacagctgtggatgggtacaggagtggcaagcacgtactgcgcacttagtgcacacgctgctcccgcctccgtccgcgccgccgccatcctggggtccgccctgtggcctggagagctcttgcaggccctgccagcagctcttggatctgggttcccattccccaggcccgctgggcttctgcctatcacgggcagccctcggctgttaggtttccgtctcactggtaaactgtggaggggacccccgtatagttctttgtggcaggtttgtggttggaaacgtggggacttccatgggaatgcctgttcccagggcctgaggctgctagcgaggctgagccggagtggctccaggctttctaaataaagcaggatggttagttccggaggcttcctgtccggcctgcgccagcccccacggggcagtgacaaggcccgggatccagcatggggtgcggtggccccacgggaagggccgggcctctgttggcccagtgttgggaggcgtggagcgtggcctctggcgcctggcagggtggctgtgccgtgtcccagaagactctgggagcaggaagcgcccttggatggcctcgtccaaccttgacttcccaagcccgagcccaggccagggagacgtggggacttggtccgggcctgctctcacgtcctttgtgtttacatgtaatcagttatgatgattgtggctgaaagggtctgcttttcccgggcatggtccgggaagctccgttccacagctgtgagctccgtggagcttcctcccgagcctcctgcccggctctgccggtgctgtagtgagagtggaggaagtgctttcctccgagatttaaccacgagaggtttcactttctgagtcttgtggtggagcctgtctctgtctgggacctggaccctgggcagcacggggaggacgccgtggcatcaggaggttggagaggtgtgtggtggagtcggacggatcttagaggggcgctcgcggggcctgctcggccctaccctgtagacagctgggacccagcgccccttctgggtccccagcagggctgtgttctccccactgggcaccccagcttgtgcgtggaggatgggaagccttgtatggcttgcccacctgggtgactgagagcggtggatgcgattaggggcggccaggggctctgggaaggcccacgtgcagggtcattatctggcagaaattaagtcctttcgcagaaccgggatcctaagtgccggtttgctggcgtgcaggtggttgcaggtgcatgtagctcctgccgccaggccctgtgtggagcatcccgcccggggggcctcccaccatgtctgtcatctgtagggcacctggcaggtcttagaattggctgccctggatccagactctcgctgtcatctgggcctggccacatccctcccctgccatcaagatgtctgtggtccagtctcccaccctccatccccactccctgcctctgggtcagaagcctccgatggtctctgctgtgggggttcctggtccagcctggcctcccgcagtctgccgacaggcgctttcaggacagcactggtgggtgggtcttcgggccacctgcagggcctgggagcagtgtggtgtccggatcaggtacgtggcctggggagactcaggttcagagcctacctctgcctcttgtaactgtgggacttcaggtctgtgcctcagtttcctcagggggcggtggggtgaggactcggtggtgatccccatcctgccgcacgtggggacccacggaatgctggctgctgcttccgctgccggtgtggtgatatcttgtcgcgtccacagcacctggcgtgtgtggcacacattgggtgctctgagaaactgctccatgggggatcctgccctgggatctgggatctgggatctgcccacagacaccttgatcaggattccccagcctcggctccgtgggtgttttacactggatcgttctctggggtggagctgtcttgggcactgcagggtactgagcagcgtccctggcctccacccacaccagaccaggagcacccccaagttgtgacaaccacagaagtccccagacatcgcctagtgtccctgggagcaggacccctgacccgtgtgtcttagcagcccccttcccttctcgtcgccatcgtcagctgcgtgtccttggtcccctgcttccctgcccatgtcattgagctgtgcaggtctcagagatgcttggcgagtgaccgtcattggctgactgaaggcagatcacgcagggaagtggagaggagtggcccgacacctccccaatgccctgcaggctggtctggtgcacgccaggggtctctgctggggcaggctcggttgccacctgcctgtgggcctgtgcactgggcagaaggggtctccggggacagtgcgcagctggctctcagaagcttctttctgagtcctgcctgtggcctgggctgccctgggctggccagcacggggcagtgggggcacactctggagggagccaggggcgagtcacttccctctcccggcctcagtttccccatcggtcacgtgggaaggctgtccctccccctgtaggattgtggaaggattaaatgagctgaggccagtgcggcagacagcggggagggagccctcttgtcccctgtggctgcccttcctgctggctgctttgcaccgaaaagctgcggagtaaccctgggcggtggtgctccctggatggcgtccacatggggaccccaaggcctgggaggctccaggagggacggtgctggcccaggtttctgtccctgtctgacctcggagttggtgttctgggtaccgcaccgtccggtggcccaggctccgttttctcttctgtcaaactgtgtggtcaccctgatgtttcaggggccctgcagggacggagtggggtggggggctgaagggtgtggtcaaactggagggcgctgtgtctgttgctattgttaaccgtgtccacactgatgggtgctgggccccgccaccgagcgggacttgtgcggcctgcagagatgtggctgttctgttgcctgtcttaatccccagggactgtggggccaggtccacactgtgggatgagtgcagcccccacggctgtggtggggctgggtccacgctgtgggatgaatgcagcccccagggactgtggggccgggtccacgctgtgggatgaatgaagcagccttttctccagccacactggtttgctcggccttagtcccactggatgcggcgagggttgaccggtcaggcccttgctggtggcctgggtagatgtctggagagggggcctgggctccggactcctgcccttcccccatcagtgatcctatcccacactctttggcgatggtcagtgagctgggcaggggcgggggtctgtccctgtccctcaggtggagatgtccaggccagtgcccacaactgggttagatgggctgcacaaggctggggaccagtctcccaggctgtcggggggcttcagtaatggctgtgggaagacccagcacgtgaggagacgggagcttagaaattttgtatggccaggtgcggtggctcatgcctgtaatccaagtactttgagaggccgagtcaggcagatcactcaagtccaggagttcgagaccagcctgggcaacatgacgagacccctgtctctactaaaaatgcaaaaaattagccagacttggtgatgtgcacctgtagtcccagctacctgggtggctaaggtgggaggatcacttgagtccaggaggcagaggttgcagtgagccgagattgcaccactgcactccagcctgggcgaccgagggagaggttctgtctcaaaaacaaacaaacaaacaaaacaaaacaaacaaaaaaaaaacgtagaaaacatgagtgagtgacaccatccgcttccagtggaggggtggggtcactcccacttgggagccagtctgcacggaagcctcagtgggaacagaacaaggtggcatggcccctgaccggcgaggggcagttagtatctgcacctttgaggcacctggggactctgctgctgtggagatgggattgggttccagtccagaggctgtcctgccatcgctgcccctggctgtcatgccccacctggggtagtgagtttcggggcagctctttcttgagcctcagcagcggggtgagccgggtgcacttcctctctcagggcgcccccttgtcttcttgcctccctgcctgagggtgcgtgctggagcagaagagcacgtcctgggctgcctgccggggataagctgcggagccaggagaccgaagtctcttcaggccctgccattaggggtcgtgtgacttcagggaggcagcttgtcctctccgtgcctcagtttcccctccagtcaatcaggcgctgaggtgctgtctacctcctggggttctgagactgaagcgaagcaggcatgaggccccttgtgaagctggatgaggggcgtccgtcctccgctgcaggagggctgcccctcctcgggcccctgcgtcaggttggtgcctggctctgaccccacacccaccagtacagctcttggtcagggttagatttcctggctgtttccaagagccaagatcacaggcacacgcatgcacacgcgtgggctgccaccacccgccttctcatgggtgctgacaaacggtcatgtgtatcccccaggtggggccctgtggctctggccttgctcccggtgtgtgcactggcctggcctccccgcagcctggtgggggcttcctggcttctcggcccacatctcacagtcttgggcactgtggggctcggctcaggcgtcgtagacgggaagcagcctggaaccctggaagtctgactcccaggtgtcggctcccaggtctcagccctgccactggggtcatgggttacttgaatctttatatactttttatttgttatttatttatttatttatttatttttgagagagagtctcactctgttgcccaggctggagtgcagtggtgcagtcttggctcactgcaacctctgcctcctggttcaagtgattctcctgcctcagcctcccgagaagctgggattacaggcgcatgccaccacacccggctaatttttgtatttttagtggagatgtggtttcactatgttggccaggctggtctccaacttctgacctcaggtgatccgcttgccttggcctcccaaagtgctgggattacaggcgtgagccactgcgcccggccttgaatctttttttttttttttttttttttttttttttgagacaaggtctcacttgtcacccaggctggagtgcagtggtagaatgtttgctcacctctgtctcttgggttcaagcgtttctcctgcctcagcctcctgagtagctgggattacaagcgcccactgccacacccagctaatttttttttttgtaaattttttttttttgagacaagagtcttgctctgtcgcctaggctggagtgcagtggcacgatctcagctcaccacaagctccgcctcctgattcacgccattctcctgcctcagctttcaggcgcctgccaccatgcccggctaattttttgtagttttagtggagacgcggtttcaccgtgttagccaggatggtctcgatctcctgacctcgtgatccgcccaccttggcctcccaaagtgccgggattacaggtgtgagccaccatgcctggccatttttgtaaattttttggtagagacggggtttcaccatgttggctaggctggtcttgaactcctgacctcaaatgatccacctgcctcggcctcaaagtgctgggattacaggcgtgagccaccgcgcccggctttgaatcttgagcatcggatgagcccccagctcctgctgtcagggctgcgccctcttgtggcgcttggagcctccttttcttccgttttcctttcccaccggggaaaaggaagctggggcacggacttcgttcctcctggttggcctctccagatcttggccagcgggtccagtcgggagggtggttttctcctctggaagctggctcagtgggagcagtgggcggactctggcccctcctagtggtggcgtgctgagtgtacctgaggatgtacctcctgcaggctccctagcgtctggggtccactgtggggcggcctgtggcaggcccaccaggaaccatgcttgcacaggcaaagcaccttgcttgtggttgtgtggggggctccctcaggtgtgggagatgtgggccccattctcccaggagccatggctggtgacatgcagtcaggtccatcctgacgggcactggagtgcgggggacccaatggggacatgagggatccagcactgtggaccagggccaggttcatttggttcgctcaggaaacatgtacacagcgccttctgcataggggctagggatgcaggtgggcagggcagccacagcccctgcgctcaggaagctggcgaggcaggctgcagacgggcactgccacacctcactgaggagggaatggcagagccaccctcaaagggcctgtgctgtgggggtgctgggcgcttcctgaacgccgggctcttggatttctgcagtgggggttctccgggcgtttgggaaggggaaggacctgatggaaggggtagtttatatttaactctggtgctgaagcaagggtcgcacacagctgccagtgcccacgacggcctcctgggaggctgagctcaccagctccagacccagtctgaggcaggaacctgggggtctcacagcgggaccggtggtgggtgtggcctcgtggcagggagggagggtgggaggggtgcatgtgaagttgggtttgactcgtcacccgtggagtgcgtgctcccctgccacaggcaggggccaggcagcatctgtcctgcaggaccctcccagctgccctttcatggccggacccctggctggatccctggcttcctgcagtgttctcttttcctaacattttgtcaccgtctcagtcagctcgggctgctgtgacaatactgcaggcacagtggcttgtaaactacccgagtttgtctcatggttctggaggctggacgtccaagatcaaggttctgtggatttggggggttggggggaagggggggttgtgcttcctggtacatagacagcggcgctgtggatttggtgtagggggtggttgtgtttcctggttcatagacagcggtgccttcttgctgtgtcctcatgcggacgggatccctcctggaaccatcagtgccctcatgaaagagccccccaagagctccgtggcggaagaagctgatcccgcctcccaacaccactgtcttaggggtgagaattttaacataggaatttggggggatcacagacattcattgctatgggtgggaccacttggtgcgttgcccttggggtggcggtgtggtcagtggtccattcctgcccagcgccgagcagcggtctgtgcgtggggtctttgcacccgtgcacctgctgaagggtctctggagctttggctttttggcttttacgagtaaagctgccgtggtgcttggtgtgcggtgaggagtggacagaaggctctgtcctggcaggtgccctgcagtggcctgagaccgggagatgagggccggcaaggggctgtggacgagtccagagtgaggcggcatctcggaggggctcacacattgtctcaggaggagtgggctggcatttctttccagtgggcagctgttgaagattttggagccaaaagagcgttccagctcagatgtctttcaggtggagtgtggctgcaggtggggcaggctgggtcagggtggagccatgtgggctgaggcccgagttggggctgtggctttggggccacatggctgccggtcgggtgggagcgagtctctgctgaccagggccctggatgttgagccccagccgcggggtgtgaggtctcaggcaggacccaggcattcagacattgggtccactgtgtgtggacccctgcgtcccagctccaagacgctgtgtgacgggaggcggcagcagctgagttggcgcggggagacagggcgatttgaaaagcaggctgggaccaaagcatcttgaaaacccaaatgtagtcacgttgcctggcttgagtgctgtccagagcctcgcccttggcctctgtacggcagggcttaacagtggccagcacctcagggccaccagaggcccggggccacctgggcctggcttggcttccggtggcccagaactcctgctgggctcctgcctccctctgcaacctctcctggctttggtgggttatgtgggagacacgagtggcttcacccagcgggagtggtgcacatgggttaacatgccagccacccagctgtgtacgggctgcatgtgtgtgtacatgtacatgcatgtgtgcgtgcaccatgcacgtgtgtgctgatgtacatgcatgcatacatgtatgtgtgggtgtgcacgtgtgcattgtgtgcatatatgcacgttaatgcatatgtatgtgtgcatgcctgggtgcataggtgtgagccacctccctcccccatcagtgtatccatattgcctctgcagagctccatgggggtccttggcgagccagggctgtggttgtcatttttgccttccttacaaaacgcaaaacaggccgggcgcggtggctcacgcctgtaatcccagcgctttgggaagctgaggcaggtagatcacctgaggtgaggaatttgacaccagcctaaccaacatggagaaacaccatctctactaaaaatacaaaattagccaggcgtggtggcgcatgcctgtagtcctagctacttgggaggctgaggcaggagaaacacttgggcccgggaggcggagcttgcagtgagccaagattgcgccactgcactccagcctgggcaacagagcaagactccatctgaaaaaacaaaacacaaccccaaacagtagtaccgagccagttctcatctgggcagtgacctgtggcgtttcagactccttctcggccgtcttggtcttcccggcatcctcgctgagagctgaggcttgcttttctgtttcatagttgagatgtttatggcctgagggaccttgtgtcttgggtgcaaagttaccaaggggcggcgccttctgacccgagtgcagggccctcctcgcctcctgcctgcagcatggggcctgtgctggggtgcaggcttgcagtgtgtgctggtctcgtgtcaggtgtggctttcagtgtgtgtgagtgtttgctgtttccaggtgaaacacccttccaaacaaacacggagcagccatcttttgtaatagcattttgttagacatagagtctcatctgggggcagtcttgacccatgggacactggcactgtctggggacatctgtggtggtcacaattcgggggggtgctcctgagatggagtgggtgggggccagggttgctgctgagcacccctcagggcccagggttcagcaccggtcagtagagctgaggccgaggatccctggcctcagattgcatcccctccatgccaccgcccttctcttcagggcgcggtgagggaagggcgtgtgggggtccctctggggagaaggtgttttcaccttcacactcaccctcactcctcctgtcctggaacttgggtgggtttgaccttttgtggatgaggtgagggctgagaggtggattactacctgagacaatcaaaatcaattttctttcttctgaaaaggactcagggtgtttgagaaaagtactggggagaggcagctgccaccggggctccccactcgggatgtgttgggtgttttgcgagaccccccacagggagctcaggtgctgtgggcagttcctgggctttgtcgagggcctcccgaaggcagcactgtggccaccgtgggacacatgcagcctgtctcatctctaggagctgccaggtgaggggtcctgcgacaggcacctgtgcaaagatatctaccatgggcagcaaggaaggttccagaaagtaccggagggagagttgtgttggggcttgggggctttctagagcagaggctgtgagaggaagtgagctgggtcccagcaccaggcagcctttaggcagctgtgattggaacagcactgtgggcagagggcaacagcgtaggacgtgtgtggaagtggggaggtgccggaagattcagagacacagggtggtgaaggcgagcctggagaagtgggctgggggcatgctgggagggggcggtgacgcttgagtctctagggcaccgggggcctgagcaaggttaatacctgagtagagagttgaggcagtctctttttagaaattagaagttaactattgctgtgtaatggggtcaccccaaaacttcgcaacttaaattaacaaaacttatttcagatagtttctgagggttgggaatgtgggagcactttgttgagtgatcctggcttggggtctctcagaagttgtagtcaggataccagccaagcaggggccacatcatttgaaggctggactggagctggaggagccactcacaagttggctccctctagtggctgttggtgggaggcctcagttcctcaccacgtgggcctctccgtgaagctgcttgagggtcctcacagcgtggcggctgcctaccccagagcccctgacccgagactgagggcaaggaggaaggcctgtgccttttgtgaactggccttggagatggcacactgtcacttccatcacattctgtttgctagaagcaggtcactaagtgtagcccatgctcaaggggaggggaattaggttccagtatggaagggatgagcatcagagatttgtggacacactggaaaacccagcattggcatcccagcgtgtgagggtgaagaaaagtggggagacggagtctctgcccaggaggtgaccaggtgagaggcagaggcaggagaggggctggagtgaggacccccatgtcacccagaatgtgtggggggctcatctggaggctggggtggagcgacagctggccacatgggcccccttcccgatagtttttccaggctgacttgctaatccttttcatcctctggggccctgggaccatcagtgtgcccatctctgagatggggtggtagcgtactcgtctctggaagcattgtgggtattagcaaggtcgtggcaggcgtggagacgtaaaggggttcagggatgtgctcagggccacctgtggcaggcacaacggtcctggctgaccccgccacagcaccaagagggagaggggagagcctcgtgggtgcttggtgcgcagggggcagtgtggccgtggccgctgagcaaagctctggggaagggggcgcccagcccttggggtggtctgtgcagagatgccgttggggtgagtccgtctgtcagggcaccgccgccacgtctgtgtgctgtccctctggtgagcattggtcatgaactggcgtgaccgtggtggagctgcacagtcccagctgcggggccggtgccgtgcgacttgatttggcctgagaccgtgtggtctttgacgtaaataccaacaattggcccccaggaaagtgtgtccttgcagaacttctggaaaaggggtggttccagtaagaccctggcttggtggaagatgggaagggcgctttgtaaactctttccgaggagtcaggaggccgtggcgtctggtggagagacggtcagcctcacgtgccttggtttcctgtgctgggtgctgcagcacggcagggtctgggtaagagggggcagcagcacgagagtcaggccccggctgccgcccgccctcacgtgccccgtcccccaggcacgggcgagagcgggaagagcacgttcatcaagcagatgcgcatcatccacggcgccggctactcggaggaggacaagcgcggcttcaccaagctcgtctaccagaacatcttcaccgccatgcaggccatgatccgggccatggagacgctcaagatcctctacaagtacgagcagaacaaggtgagcccgcgggcgcctggggaggggagcgcctgggcagctgtgggcttggtggtgagcatggtggccgcgctgccagggtggggccatgccgggggtcccggccggcccaggctacccctggtcatccatccgttcctgtcatggacatggaaacagcaaccgctgacttcctgggggccaactggagagttgtgatgggcattgcgtggccaagccccacagcctccctcccaagtagctgtgggcgcccacatcctgtgggtggggaagctgaggccctggggaagctgaggccctgtgaggtgagccactcgcccaggtcgccttgggagtaagcagcgtgagctcctggttccggccccttccccaggctgagcagcctaccaggcacctcgtttcggccctgacactcacccatggggctgtacttctcaccttctcacactgtttttttgttttgttttgttttgttttgttttgaaaacagggtctcgctctgtcgcccaggctggagtgcagtggaatggtcaaggctcatcacagcctggaccttctgggctcaggtgatcccaccacagcctcccgggtagctgggactgcaggtgcatcaccacgcctagctaatttttgtattttttgtagagatggaatttcaccatgttgcccaggctggtcttgaactcctgggctcaagcagtcctcccgctttggcctcccaaagtgctgggattacaggtatgagccaccatgcctggcctccgccctggttttttttcttttttttttgataaagtagaggtcatttgatgccctgtttttaaatcacagctttattgagttataattcacattctatgcacttcacttgcttaaagtgtataatttggtggttttcgatatgtttgcatagtcgtgcagccatcaccgctgtcggattccagatttcattttctcaaaggaagccccttccccatcggccgtcactcccaccccctcctccagccccggcacccacacatccccttcctgcctctgtggatcggtctgtcctgaacatttcatagaaatgggattgcacgccatgtggccttttgtgtccggcgtctctcactgagtgtgacgtcctcaaggtgcatccacacagtggcctgtgtcagagcctcgtccctgttcatggctgagtcatgttccagtgcatggagggaccgcgtatttgcccatttatcccctggaggacatttgagtgccttcatgtgtgggctgttgggaacggagctgccgtgaccgtctgtggacgtgtgtttatgtggatgatgtgttcccttccctcagttgcatgctacgcctgggagcagaattgctgggtcccagggtgactctggctttgccctctgagaagcgtccagagagtttgccccagtggccgccctatggggcaggcccagcagccgtgcagccgtggctcctgccagtggcctccctggggcctttcagctgaggggccattgatcccgctttcgtagccctgctttcaggggtagggctcttgcccttagatcttggtttgccacttgccctgtctcccgctgtgatctcttccagctgtggccctctctgagagtccatattcatatttgggcttagatctccatcagcttctgaaacacgcatctgcaaactgcagactgattttgtcgataaagttttattggcacatacccatttctgccatgttgcccatggtgcttcagcagcagcagcagagccgagtgctggagacagtccgtgtggtcgggaaggctgggtgtgctctctggctctctgcagaagcagattgctgctgtctaatctggaagtttccagggagtgggatttttggggtttgtgtctctttttccaagtccccctaggtgtgcttatcccagcccagattgagaggctgggggcagggcaaggggagggctgaagtcggagtccggggcagggagcgttgctcagaggggacaagcaagggctgagtctccactctggggggcctgggagggccccgtggctcccagagcccagggcaaggctcccttctttcccatctgggtcccacccagtatgtcccctccccagtccctcagccaaactgtggctggtcatgtcggcctgtgcgccccggggacggggacacagagcatcaggaggggaaaggatggcccccccacagtgtctgccccaaagggtgttcacatgtgtgtgcaagcacgtgtctgtgcggttggccttcctttgtgacagggcagcaagctggggcctgatgccacccgccgcccagggttccgtgagggggaggcggctcgtgttggggcaccatgtaaactgttgagtgcggcagctcgggggccacacgccgtccttagcaccgggtgtggtatctgctcttgatgatgtttgataagcatttttcggacgaaagagagaagccggcggggcagaaaccgagtctggagctgcacactgcaggcgatgccgctggttgcaacgtcctgtgactgggcttcctgcctcccggtgtgtctggagaattcgaggcagcgagtgctggggctgttggttagttctgtcgtcgtgcttggtcgtgctcggcgctgcactgccctcctgtgggtcctgggtttgaagtgtgtgtgttctacacgtgcttgttccccacaccgtcccctccccacctctaagaagtgaatcgaagcccggcctccccggcaccctgcagaccgcaccgccgggaggctttgcttgtggggccttgttcggaggaaccacaccgccaggcggcctcgcgtttttctgacacgtgttcacacggaactgtcagtggtcctgactgcacagcctgcggaatgccgcccgggccagccgaggcctggaagaggggccgtcacaagctttctggtggatgtgtggccccagcgagctctcgacgtctcccctgcccgccctcgcaggccaatgcgctcctgatccgggaggtggacgtggagaaggtgaccaccttcgagcatcagtacgtcagtgccatcaagaccctgtgggaggacccgggcatccaggaatgctacgaccgcaggcgcgagtaccagctctccgactctgccaagtagtaagtgcggccgcaccgctggcggcctggggacggcagctgcgggccggtgcctgggacccttcgggaaggcctccgcggcgtctgtggtgccccctgcctgctcgccgggggcagggatgcggtgggcccgggccacctggccggatggagggaccagagcagatccctggaggggccacgccttggcaggagccggtggactctggtgtgacactggcctgcttgtatgcctggccctgccgctgccctccctgggtcaggagtgagctcctggccaccctcggtgctggagcccggcctgtggcctgtgggggaaacccagggtctcctaggagggccgtgggatgggaggtagacacaacctgggccgtctcgctcctgcctgggacatcgtccccagagccacgtctcccactagtgactggctgtgaccttgactgatgtcagggttctcccagtctctgggcctgggatagggggtgacttgtgtgctgacaggtggccgggccatggccgcaggtggaggcccccgcgtggcaggctgtgcactgctgccctccatgcttggcaggcagaggccccggccctcccccagcaccgggagagaccctaaggcgacagggacaggcctgtcccccgcccctcctgcccgtcctctgtgtgttccctgcctctgggaggttgtgggagggcccagataaccaagcacttggaacaaaacgccagggcctcctcgcggtgccggaaaggtctgagcaggcacccggcctcttacaacccccaccccaggcagaccactcgaggggcgccccactcaggactgcccagggcgtcaaaaacgggaaactgtcccaacccagagggctgggcaggaaaaggcatgaggggaaccaaggaagccggaatcaagcgtggacttcagtagctgcgctgtgtagacactggctcattgctcgtggtgggtgccgcacccacgtacagggagcagcagggagacgggcacggggatctgctgggacctctgcagcctctgcagctgcgactctcctaatgatgcgcttgtttgtgaagcctcatccctggggccagccaggcctctctcgggaagtcccctgccctgggtcaccgtctccctccttggtggccgtctctggacagctctactacaaaccccccgaaccagctggagtcctcgtcctgggactttctcttgtgctgggtcatttctgtcccctgagaccccagagaggatagaggttgggaggctcgtatcccgaccccagggtctccattggcccgagccctccgggctgcttcagacactgccgtaggtggcgcagtgcgcggtccaccccctcctggtggctttccgtcctcccgctggtttgggtgctgtgtccctgtcctgcccccccacccccggcagccggcctgagcacccaccgctgtgttgcagctacctgaccgacgttgaccgcatcgccaccttgggctacctgcccacccagcaggacgtgctgcgggtccgcgtgcccaccaccggcatcatcgagtaccctttcgacctggagaacatcatcttccggtaccgcccgggccacagcaggcggggagggggcactgagaggctcatttgcccggtgtgccggctcatgcctgcgcacccagtgctttgggaggccaaggcgggaggatcgcctgagtccaggagtttgagaccaccctgggcaacatagccagacctcatatctaaaaaaaattttaaaaattagctgggcgtggttgtgtgcacctgtggtcccagctactcaggaggctgaggcaggaggatcgctcaagcccaggaggttgaggctgaagtgagccatgatggcaccactggactccagcctgggcgacagagggagaccctgtttcgtcttattaaacaaaagaaagcccattggtcttcatcctcagtgtgtgtttgaccaggtcaggggataagatttatctctaagtatgtgtgagccagggccacacagggaaggagctgtgggggtgtggggggcgtggccacatccatccagaccggcagccgaagagacctggcagggaggacatttgacagggcctccaggacgggccgggggcctggttggagccagcatggggctggggtctggagtgctggccggagcagggggtgccgcatggtgcgggaggggtcatagggactgaggctgccaggggagggggctcatggggaccgaggctgtgaggggaggaggggtcatagggaccgaggctgtgaggggagggggggggtcacggggaccgaggctgtgagtggaggaggggtcatagggactgagtggggaggaggggtcatagggactgaggctgtgaggggaggaggggtcataggggccgaggctgtcagggaagaggggtcatggggaccgaggctgtgaggggaggaggggtcgtggggaccgaggctttgaggggaggaggggtcatagggactgagtggggaggagggctccaggctggggtggaggagctgggtggtgtggggtggattctgttcttcacgggctgcccctgcggatcctgctgggcctccggggctccaggtccactgtggctgggggccggccagcagagccgggttctccctggggaccctcagtgggtcctgtgtctggtaggctgctcagctggctggactctgctgtccctgggaacgtggaccctgcctgcctgtctcctggccccatataacatctccagcgctgaggtcccggctttatgcgtgcctgtcctgggctgctggtgtcgggcgtgagactcccaccgcaggccttattcccgcccagtgctggaggccagaaggctgagatgcaggtgtgggccgggccaggtccttctgaggctgaggggatctgcccaggcctcactcggctcctagtggcggccgcatccttggcatccttggcatccttggcatccttggcttgtggccgggttgcctcatccctgcccccatcctcatgcagcgtcctccccgcctgcgcctttgcctctgttctcttataacctgtccttggccagggccaccctacctctgtgtgacgttatcctaaccagtgacatccgcacagaccctgtttccagatcagagccgtccccgggttctggtgttcgtgcgtgtggggcgctagacggctctgtcctggagggcctcgcggtggctccggttgcgggtgccttctcctgcagtgcaagctcgccctggcactggccctcatgagggaatgacgcctccctgccagggtgtccccacccagctggtgcactgccgaggccattgtgagggttccgggaagtctgtggggttttcctcgagagccctgccttgagacccaccccagggctgggggtgccaccccctgccatctgcctgttctccccacccgtcctcccagctcggcctcccagcgcaggcagggaggatgcggcgtgaagatggaggcagggatggagcaatgtggccacaagccaaggaatgccaagctctgggatggttcccggggacccgagcaggcgctgggccctcagaagctgcggtgtcctctctggacatgggcgatggtgtatattgttacgagaattcaagtttttcttcttttttattcacacggggcccatgaccccaggatacagctgaggcgagccaggcataggccaggttgtggcatgaatgtcccctcacagccccacgctggcctcttaacagcgcaggcctctgtgtcctctgtcagaaatgtcctgtcccctccctgagctgagctcaggctgggtgtgtcaccccctctccaccatcttccaggcccttcccagctccagctgtgcccttttcttttttttgagacggagtcttgctctgtcgcccaggctggagtgcagctgtgcaatctgggctcactgcaagctccgcctcccgggttcacgccattctcctgcctcagcctcccgagtagctgggactatagacgcccgccaccacgcctggctaattttttgtactttttagtagagatgtggtttcaccatgttagccaggatggtctcgacctcctgacctcgtgatccgcctgcctcggcctcccaaagtgctgggattacaggcgtgagccaccgcgcccggcccggctgtgccctctgtgccgggtgcagacccccgtcctgagcctactcctctgccaccattgtttctctgccagccgcctctgtccaccacacgctggcagagggccggccaggtgctgtgggatgcagctggaggccttgaaggccggtgggatcgtcccagtgcgtgaggagaggctcctgctccctcaggtggggacaagacacggggggacccggatcccagccctgccggccgccgcaggcgtgcaggagaggcctcgcgctccagacgggctgtggcctggtgtcggcacacccactgtcctcccgcctggccacagctgctggtgcgggccctcttgtcccttagagtcacctggcacatctgtcatccaccggtgcctgctggactcccccgcagaccagaccaggtggatttcaccactcacatgcccaaagcagccccgctctcctcggcagagttgcagggaccccggccttccctggggcctggggccagggcctgaggggcactctccgcttctgcctttgtattctttcaaggagaccaaagtgccttttctcgttatagaaaacttagaaaagtcacaagtagaaagaggcaaacgtcccgtaaggaacgcacgcccgcagacatcgtctgagctgattttctttctcccgcctgtgcgtggcctgagagtgtgaggttgagctgctcaccacgcggggcagggcgctgcgcctgctcttctgccccaggaggataccggcaactctgccctctgcagccgtcactggagggtccctgcagggagcaactgtggcatcagtgtttactcctgcgagtgacgcttggtgaacatctgtgtccctggcccagtgaggggaaaggcttctgtgctcagggtgacatccagatgccagatgtagggtccctgggcacccatcgcaggttcccgcagcagctggcgcccagaatcctctgggttctcacacccccacactagcgcccgcttccctgggcccagtggtctcaggcccctttgccagtgagggaagggtctgcggtggtcacccctggaggcggtgcggccgctctctgagagcgtccttgcccgttctaagagtgggggctcttcctgctccagccgatgtcagtctggtgtggcaggaggggcttgggtgggagccgtcctgggattgcagattgggccttggggcgccaggtggctgagtcctggcgctgtgtcctttcaggatggtggatgtggggggccagcggtcggagcggaggaagtggatccactgctttgagaacgtgacatccatcatgtttctcgtcgccctcagcgaatacgaccaagtcctggtggagtcggacaacgaggtgggccctgccctgagcaggggcagcgttgggggccgggccttccccacctgccaagcctgggtcccctcacctgggtccccccagctgccccttgggctgtgtgcagtggggagggcccctctgattccctctgccttcgctcccgccagaaccggatggaggagagcaaagccctgttccggaccatcatcacctacccctggttccagaactcctccgtcatcctcttcctcaacaagaaggacctgctggaggacaagatcctgtactcgcacctggtggactacttccccgagttcgatggtgcgccgggctgcggcatggggaggggctcgcgggcagggccttactggggggagggggctgatatgggagaggggctcatacaggccgggagctctaagggagggcgtctgatgggaggtgtcatgtatgggagtggagtctcagggaagggagatctcgtatgaggggggcctgtacgggaatgagttctccgacgcgggtgtctcatacccgtgggagatctgttaatgcagggactccttatacaggaggggtctcgggtgggaggggtctcgggcagggggatctcgggtgggaggagtcttgtacaaggagggcaccatgggagggggagtcttgtattggtgggtcttgtacgggagggagttgtcgtatgggggtgtcctgtataggtgatcccatatgggaggggtctcacaggaagggttcacgcacactgccagcgcagccccgtggggaccttggtggtagtccctgcatcctcctctgtgccctactgcccccaccctcggacccgtccctccctacgtggcccctgccccacggggtgtgtcagggcagctgagcactgagggtcttcacatgcccagccctctctgggcctggggatggcggccaggggagggtgttgtgtgccctcgtctgtgtggtcagtggctgccgttagtgctgtcaccactcagagctgtccctgccaggcacagtgaggccctgggcagctctggcgccctcatttccaccccggatctgtgctcctcccgtgagtctcgggtgtcatcttcgggagggcccctcagggtgccctgcctctggatgtgcagcgagagggaggggtctggcacacggtatagcctcggccgctggctgcaggcgcagggccctgctgtccctgggcaggggagtggcggggggcgctgcacctgctccagccgcacgtggcccctgcccagcagcctgtcctgtgggctcagagagccctggtggggggaggccaagggactggggcatagacccctgtcccaccagtccccagagcagccccttgaacacccccaggggcctttccaccggggcaggcaggagttactgggcgggtcgcctgcattgtccagggtggtggaggggcaggggtggccggtgggaagcagcgcccctgctggagcccctggatgtctctgaggcctggctgcagcaggggcaccgtgggtgggtgggggccactgttcctgctctgtaggctctgtgcccagccctgggggcctctcctctcaccctgggccttcgcagggcagccatgccagaggcctgccctggaaggctgtggctgtggagctgagtggatagaggccggcagagggctgagcagagggagcagcggtgggtgcagagccccaggttggaggcctgggccgtgacagtagtgccctggggctacagtgggattggcaccgcagctcacctggggagggaggggagctgcggcccgtcaggcatgcagtgggctgggggtcgagctgggtgggccgtgggccttactcgctcatcccctgggagtgacaaaggggcccacgagtcccttgccctgggccgggctggggcacagcctcaccctctgccctcccccaggtccccagcgggacgcccaggcggcgcgggagttcatcctgaagatgttcgtggacctgaaccccgacagcgacaagatcatctactcacacttcacgtgtgccaccgacacggagaacatccgcttcgtgttcgcggccgtgaaggacaccatcctgcagctcaacctcaaggagtacaacctggtctgagcgcccaggcccagggagacgggatggagacacggggcaggaccttccttccacggagcctgcggctgccgggcgggtggcgctgccgagtccgggccggggcctctgcccgcgggaggagatttttttttttcatatttttaacaaatggtttttatttcacagttatcaggggatgtacatctctccctccgtacacttcgcgcaccttctcaccttttgtcaacggcaaaggcagcctttttctggccttgacttatggctcgcttttttctaaaaaaaaaaaaaaaagaaagaaagaaaaaaagcaacgaaacataaaacacacaagcgccccgtgcccccagtgactctgggcctcacagagcccccgccagccagcatggggccccgccctgcagccagtcacgcgcccccacaccgcagccccccgtggctgtccttccaaccccacgtgctttttctttctcctgcccgcttcttttcttcatcacaaaaggcgtggagactcggagacggacgtttttccccttttttaagttattgacgcccagcgcgcctcgcctcttcacccatcaacgctgtgctttgcccactggactcctgaagagggggtggggggctccctcggtcgcccaccctgggaagtgcctaaccttttattttattttatttttttgaggaaaaagaacgcctgactcacaggttgaagaaacaccctgggccctctctcatggccgggttccccgtccctctgcagaggctgggaagggtccccgggctggagccacgggggcttctctgggctgtgcctccggggccaacactggctgcttggggctgcccggggactccagagggctgcacggccaccctgccctggctagagcgcaccccaccggagcccacgtgggctgggcggctggagggatggtcccccggtgacactgggagaaaggccacttggatgggggcgtttctgttttgttccgctttgtgatgtcaccaatttggaaacagcgagggtgggtggggacttttacagaatattctcaggtgtgtacccgagaggcagagagagggacgtggccggcagctctgtgcgtggccttgtcccaagcacttgcgcccgcccccgagcgccgcccccggggagcgggaagccagcactcgcactttggccaggggcgcgtggaaggtggtggcaggcaccggcctgggcagcttccaggcctggctggccacgaccacggcccgagggggagcccgccaggccacgccgcactgagccacagccccgggggccgcctcccggggccccttgaggcactgaggcaccgagactggttctccccgagagactcggaaggtggggaacgaggggactgtgtttggggaggtggctttttcgtctgctgttgactgaacactacagcgccctgtggttccgggcttcgcacagctgtcccagggatggatcgcctgtgctgccttcgcccgccgccacaccgggaccctgcacggctgcttctggcctcgacagatgacaaaagaaacagccccaaaatacgaccactccaaccagcagttcccgcctgcctgcccgccactgtcaggcctgccctggcctcctcgtccgcagggctgtctgctggcttctgggggcagaagagcggggagccccgtggaagggtcaggggagaccaggtcagggcagctacatttctggtgatcagccccatggggagacggggctggcgggataccccccccccggcttccccacaccacttctgtctcacccggaagcgtcctttttttgtgccaggtgtctacctaagagggttggtgccagaagccccccatggcgagtgctggggcccggcggtgccctgggggagcagatggggccacccctggcagggccgctacaaccttttccagcagcggagccctctggggggcctgtgcttgtggcatctctgagggcctagattgcacaaggtgacctggccgtggcctgagggtggagtcgcccagcacgcaggccggggcgctgcggggctaagtattaggccttcccagggagggggcgtgccaagcatcccagagccgggctgggaccgccaaaacgtcgtggcctggatcctctgggtctgagtgcctgatcccctgccccccaaaaaagcagaggtaggtgttgcaggcccagggcaggggtgcctgccccaggagagtcccaggcagtggttctcgtgccagtggcacccaggggcaaggacagccaacccccacccttgccacgtgtggggccacgtgggcatgtggggtgtgtgtttttaccttggtgaatctcacctgccaacgatttctcgtgagtgccgaccaccttctccgaccatgttacgcccgggcggcagcagcccccggccactgcaaacccatgccctgggtcccccggctcccccagggaggcatccccgtgccaatgtcccccagtggtggcagcagatcctgtggccggcctggcggacgggacccagtgatacttgtatattacacagtcctgatttcagacaatttcaaccttaatctatttaaaaaagaatattctatacaagctgtttttaagccttttaccatttgaaatgcatgtgttgtgcgcgttggggatgggaggaggggctgaggagcggctcagtgtcacctcccacagccaccggccctgacccttaatccagacaccgatggaagtcgacttttcatatctttctcctgaaatgaactctgttttaaattggaataaattttgttcctaaatgctggcggcccccttctggtttatttcctgttgtccttcaaagggggctggggggaagtgtgcagaggcctggcccccaggagccctggagttacctagggcattgcctgacctcagtggggccgcctgggtgcctccgcacggtgtcccggggcccctcccctgtcatcttgtttgacccttcacttcaagttcatttcactagcaccaggccagagcaacctgcttgggaaatgccaccttgtttgggggctggggacaagggagtgagacggggaggagcccaggtcccaggccagcctgcccctcaccttccagggcacctgtggggacatcatgccctccgggcctccgtttctgtaagctgcggatgtgggacctctgcagccttccttcagttattttttccttttgaaaaaaaattgtaaaatacagataaatttctaagtgcacagctcagcggcattaagtgtatccacacggttgtgcagccatcaccaccatcctctccagaacttgtatctccccaaattgaaactctgtccccatgaaacactccccgtccccctccccagcccctggcaccccccatcctaccttttgtctccctgaatctgacagctctatggacctcctaggagtggaaccatgcggggtgtgtccttctgtgtctctggcatctctcactgagcatgatgtcctcaaggtgcatccacgctgaagcccatgtccggattcccttccttttcgtggttcagtaatattccactgtgtggatgggccacgctgtgttgatccatctatcatcgatggacgtctgggtggtttccaccttgtggctgttggcagtcgtgccgctgtgcacctgcgtgtgcaagcttctgtttgagtccctcctgtctgtcctcgtgtgtgtgcatccagaggtagcattgctgggtcctctggtctttctttttttggatgcaccttgaggagtctcgctctgtcgccaggctggaatgcagtggcgcgatctcggctcactgcagcctccacctcccgggttcaaccaattctcctgcctcagcctcctgagtagctgggactacaggtgcctgccatcacgcccggctaatttttgtatttttagtagagatggggtttcaccatgttggccaggatggtctccatcttgacctcatgatcctcccacctcggcctctcaaagtgctgggattacaggcgtggaccaccgcgcccggcctctattttaattttttggggagctgcccgacttttccacagcagctgtgccatgtcacatcccgccagctgtgcacaagggtgcgatttccccacatcctctttcagtttcattgagtccgataggcctgtccgtcaggcttaaggccccttgctgtgcccgatgctgccccagatactacagtgcagcagagaaggtggcacttaccagcacgacttcacctaggaagagaaatggagcagggaagtgggacaggatggggagatggtggctgttgcttttcttttctttttttttttttttgagttggggtctagctctgtcacccaggctggagtgcagtggtgcggtctcagctcacctcaacctctgcctcctgggttcaagcgattctcctccctcagcctcccgagtagctgggactacaggcgcccaccaccacacccggctaatttttgtacttttagtagagacggggtttcaccatgttggccaggcttgtctcaaactcctgacctctggtgatccgcccgccttggcctcccaaagtgctgggattataggcgtgagccacagcgcccagccaatggtggctgattctggtgggctgttcctggtgggctgtacaggaaaagcctgataaagtggtgcgtgagtagcatcctgggagacaggaagggaaggagccatgctgtggcctgagggtgagccaggcagaggcacagcttgtgcaaaggtcctggggcaggaccatgcctgatgtgttggaggagcagcgaggaggcccgtgtggttggagcggagggagggggggagggcagggagggttggtcttttaccctcagagggaggtgggagccctggagggacgcaggcagagcagagacaggacctgacaggtgctcacaggcggcctctggtggctgctgctgggaggacagacgggtgagggcgggagccaggggacaaggctggtgcaggtggcaatgataggtgtggatcagatggcagaagcagaggtgggtgagtcagctaaggggcgttgagtgctggggggagctgggcccggcatggatatcgcaggtgcatatagtgcccccagtggccagcaggagtcgccccagacagctccttgcctgcccctagccccctgcccatcctaaaaggaaaaccgaggcacagagggtgagcgtcttgcctgaggcagcttgccctgacggctggccagtccttcctaggtcctgacaacagccctagcctgttcagctgggcaggcagctccagcaccccccgcagaatccataggacccggagcaaaatgaaaacacagggtccctgtttaaaaattccgaggaggccgggtgcagtggctcatgcctgttattccagcactttgggaggccgaggcgggcggatcgtttgaggtctggagttcaagaccagcctggcctacatagcgaaacctcgtctctacttaaaattcaaaaaattagccgggtgtggtggcgcatgcctgtagtcccagctacttgggaggctgaggcacaatgatcgtttgaacctgggaggcaaaggtagcagtgagccgagatgatgccactgcactctagcctgggcgaagaagtgagactcctcaagataaataaataaacaaataggccaggtgcagtggctcatacccatctctactaaaaatacaaaaattagtcgggcgtggtggctcacgcctctaatcccagcattttgggaggctgaggtgggtggatcacttgaggtcaggagttcgagaccagcctggtcaacaaggtgaaactccgtctctaccaaaaatacaaaaattagctgggtgtggtggcgggcgcctgtagtcccagctactcaggaggttgaggcaggagaatcgcttgaacccgggaggcagaggtttcagtgagccaagatcgtgtcattgcactccagcctgggtgacagagtgaaactttctctaaaaaaaaaggtggctgggagtggtggctcacgcctgtaatcccagcactttgggaagccgaggcgggcggatcacgaggtcaggagattgagaccatcctgactaacactatgaaacccggtctctgctaaaaatacaaaaaattagccgggtgtggtggcgggtgcctgtagtcccagctacttgggaggctgaggcaggagaatggcatggaccggggaggcagagcttgcagtgagccaagatcgcaccactgcactccagcctgggcaacagggtgagactctgtgtcaaaaaaaaaaaaaaaaagcaaaatcttagagttattggaagtgtaaattggtgcatgcactttggcaaaagatagttaatatctaggaaatactttataacccagcaattctaccattgggtatttacctacagaaagccacacatataatcacaaaagacatgtaccaaatgcccatagctgccctattcattacagccccaaactaaaatttaaccaaatgcccatcaacagtagaatggatgaatagattgtagtttatttatccagaggaatagtctatgacaatcaggattaatgaaccacaaccatgtacacaatatgagttaatcacacaaacatcacgtggaatgatagaagccagatgtacctgaactcattttatgtaattctgtgtgcataaagttcaaaactggcaaaaattcaccatgattttgaggattttttttttttttttttttttgagatggagtcttgctctgttgctcaggctggagtgcaatggtgcaatctcggcttactgcaacctctgcctcccaggttcaagtgattctcctgtctcagcctcctgagtagctggaattacaggcacctgccaccacatctggctaatttttgtattttagtagtgacagggtttctccatgttgtccaggctggtcttgaactcctgacctcaggtgatccacctgcctcagcttcccaaatttttgggattacagctgtgagccactgcgcctggcctgaaaggtctaatattttaagcttctactcccaagaaattagaaagagaagagcaaactaaacacaaactaaagagaaaataatagaatagaaatcaatggaataaaaaatagaaaaacagtatagaaaaatcaataaagccataagctggttctttgaaaaaaattaatgaaattgataaacctttagtctagattcaccctccagagagaaaaagaaattaccagcaacaggcacaaaggaggggatatcattactcaccctaaagaaatttaaaggataataagggaatactacaaataagtgtatgcacataaatttgacaacttaaaggaaatggaccaatttctcgagagacacaagctaccaaaactcactcaggaagaaacagaaaacctgaacagtcctatacgtattaaagaaacagaatttgaagttaaagtcttctaaagaataaaacatttgggaggctaaggcgggtggatcacgaggtcaggagatcaagaccattccggctaacgcggtgaaacctcgtctctactaaaaatacgaaaaaattagctgggcatggtggtgggtgcctgtagtcccagctatttgggaggttgatataggagaatggcgtgaacccgggaggcagagcttgcagtgagccaagatcatgccactgcactccagcctgggtgacagagcgagactctgtctcaaacaacaacaacaataaaaaatgaaaaataaaataaaactttaggcccagatggttttagtggtgaatcctatcaaacatttaaagaaaaaataacatcaaattcttcacaatctgtttcagaaaatagaagaggatggaatacttcccaactcattttaagaggccagtattatcctgataccaaaattaaagacagtacagggaaattacagatcagtatactcaaaaacatagatactaaaatccttaacaaaatattagcaagtgaaataatgaaatccagtgatatacagaaagaaaaccacctcaccaccaggtggcatttatcccaggaatacaagacaagctcaacattggaaaatcagtcaatataacttgccatattaacagacgaaagaaaaactacatgatcatatcaatagataaagaaaatacatttgatacaattcaactttcattcatgataaaaattctaagcaaattaggagtagaaaggaacttcctcaacctgataaagggcatctgtaacaaaccacagctaaacaacaacaacaaaaatactattggccaggtgtggtgtctcatgcctgtaatcccagcactttgggaggctgaggtgggtggatcacctgaggtcaagagttcaagaccagcctggccaacatggtgaaacccccgtctctactaaaactacaaaaattagctgggcgtggtggcacatgcctgtaattccagctactcgggaggctgaggcaggagaatcacttgaacatggaagggggaggttgcaatgagccaagatcacgccattacactctagcctgggcaacaagagcaaaacgctgtctcaaaaaaaaaaaaaaagaaaagaaaagaaaaaaaagaaaaaaatatgtacacaaatgtatatagcagctctgttcatgatcacctcaaactggaagcaaccaaatgcccctcacggttggataaaggggaatgcatccacacagggaaataccactggaccatccaaagcaacgaacttctgatacactcggcaacacagaggaatcgcaaatgctaactgaaagaagccagtctcaaaagctactttctggaccaggtgcggtggctcacgcctgtaatcccaacgttttgagaggctgagctgggaggccaggagctcctgagcagcctaggcaacacagagaaacccatctctacaaaaataaaaaaattagggccgggcgcggtggcatccgcctgtaatcccagcattttgggaggctgagataggtggatcacttgaggccaggagttcaagaccagcctggccaacagggcggaaactttgtctctactaaaaatacaaaaattaggcgggcacggcggctcgcacctgtaatcccagctactcgggaggctgaggcagaagaattgcttgaacctgggaggtagagcttgcagtgagctgagatcgtgccactgcactctaacctgggcgacagagtgagactctgtctcaaaaaaaaaaaaaaaaaaaaacattagatggtggtggtgcgcagtactcggaaggctaaggtgggaagatcgcttgaacccaggaggtcaaggctgcagtaagccatgattgcaccactgcactccagcctaggcgagagagaagggccttgtctcaaaaaataaaataaaaaacatagcaacagctatttccctcggagcgagcgggggcggcggcctgtgcagcaacggccaggatcaaggcccaagaccttctcgggaagaaggaggaggagctgctgaaacagctggacgacctaaaggtggagctgtcccagctgcgcgtcgccaaagtgacgggcggcgcggcctccaagctccctaagatccgggcgcggtggctcacgcctgtaatcccagcactctagggaggccgaggcgggcggatcacgaggtcaggagatcgataccatcctggctaacacagcgaaaccccgtctctactaaaaatacaaaaaaattagccgggcgtggtggcgggcggctgtaatcccagctactcactcgggaggctgaggcaggaggatggggtgaacccgggaggcggagcttgcagagagccgagatctcgccattgcgcttctgcctgggcgacagagggagactctgtctcaaaaaaaaaaaaaaaaaaaaaaaaaaaaaaagatccgagtcgtccgcaaatccattgcccgtgttctcacggttattaaccagactcagaaagaaaacctcgggaaattctacaagggcaagaagtacaagcacctgcacctgcggcctaagaagacacgcgccgtgcgccgcccgctcagcaagcacgaggagaacctgacgatcaagaagcagcagcagagcgagcagctgtccccagtgcggaagtgcgcggtcaaggcccgagtggcgcgttgtcaataaagcacagctggctgagaaaaaaaaaaacaaaaaaaaaaacaccaaaacaaacaaacaaacaaaaaacacagccacaaagagccaatccacggtcaggagggagttgttccggtgatggaactacattctgtatcctgtttatagcagtaatttacacgaatctctacagctgttaaaactcatagaaaccaggccgggcgcggtggctcacgcctgtaatcccagcactttgggaggccgaggcgggcggatcacgacgtcaggagatcgagaccagtctggacaacatggtgaaaccccgtctctactaaaatacaaaaaaaattagcccggcgtggtggtgggcacctgtagtcccagctattcgggaggctgaggcagcagaatggcgtgaacccgggaggctcagcttgcagtgagccgagatcgtgccactgcactccagcctgggtgacagagacagactccgtctcaataaataaataaataaataaataaataaataaactcatagaaccatacaccaaagaaagtaaatacaatgctacataaatttagacaattaaaaacaagatctttttttgggggggacagacccttgctctgtcaacccaggctggagtgcagtgggtcaatcatagctcactgcagcctcaacctctctggcctaagcaatcctcccaccttagcctctggagtacctgggaccacaggcatgagccaccacccccggctaatttattttattttattttttagaaatggggtctcactgggaaggtggaggttgcagtgagctgagaccgagccattgcactccagcctgggcaacaataacaaaacaccgtctcaaaaaaaaaaaaaaaaaaaaaaaagaaagaaagaaagaaaaaagaaaaaaagagatagagtctcactatgttgcccaggctggtcttgaactcctggggtcaagcaatcctcccacttcagcctcccaaagtgctgagattataggcatgagccaacatgcccagctgaaatagatcttattagcaaaaaataccccccaaacccggaaataaatattaataccacagaagtcagaatgatagttactgctgggaaggtagagattactatgaggaaaacactaggggtctttgtggggctaaggtctttttttttttttttttgagacagagtcttgcttgtcacccaggctggagtgcagtggcacgatctcagctcactgcaacctccacctcccaggctcaagcaatactcctcccccggcctcccgagtagctgggattacaggtgtgcaccatcacacctggctaacttttctatttttagtagagacggggtttcaccatgttgtccaggctggtcttgaactcctgacctcaggtgatctgcccaccttggcctcccaaagtgctgggatgacaggcgtgagacaccgcgcccggcctgaaaatgtccttagtcttggcctcagtggattctgtggataccggcttcacaacaatttattaggtaatacattcaggttttatgtgttttctgaaagaaatattttctacacacacaagctcaccctggtgttcccagctgagctaataatacacgacaaatgctcagcatgtggcaaggaagtagctcagcccgtttagggaaccgcaagggaggtttgttcagcagctggagaagtgggcagagcctgggccctggatccagggagccggctcattaattctgaagccagcgggagccacagagggtctgccaccctggtccaggctgtgaagatggcgggtgctggtatcctgtccaaaaatgccgcagggagatgctaggagagtggccccctgggctcaccctgtggggcctgtggctcagcctcgtctcccagttttgctggtcatttctgtttcaaccatcctggaagatctgcacggccatgacctatttctgcgtttctttgcctgtcctgggtgggactgcccctcgttgctgctatccggttgggggcgggaaggtgggtggctgggtgggcagatggcacctgccagccccagtgaccagatgggggcccctatcgtacttcccatctgtcattcgttatgaatcaacagtggagaaaaccacacgtttgtgctgagctggtgaagctgcgtcaacggctgtcaccgagccctggtgtctgggaggaggtggggacggtggctgccaatggctgtgtggccctgggcacgtaattcgccctctctgtgccttgccctatctgtaaagggaccagaggcccccgaagtacaagaattacgtgtatctcttggggaggagagttttgatccagaactttctagaattttctacagcctgtcaatgggggtggggaatcttcacccaaacactctggctctgagtacctaggaagcagcaacgtttctaccaagctgccagccaccagcccacccctagggccctgaagtcccagagggatcaggtcagggcggcctcatggcactcattgggaagatctccttgaccagtgaggtccactcccaaagtccctcttacacccgatctgcctgtctgacttctgatcctgaatatcacttgtctgtgcgacctttgttgatccatttagagcaatgaccttgaaccttccccaacaacatctctgcttaatttttctggcagaatttttcaccatccaacgggctcaggtgtattaaaaaatatatatattttacacgtgtgtgtatatatatacacacatatatatttttatgtataatatacatatatgtatattaaaatgtatacttttatgtgtgtatatatgtatgtgtatatatgtatgtgtgtctatatattgtgtatatatatgtatgtgtatatatgtatgtgtatatacatatatgtatgtgtgtctatatattgtgtatatatatgtatgtgtatatatatgtatgtgtgtgtgtgtatatatatacatagagagagagggagagttttgttttgtttgtttctggagacagggtttcactatgttgcccaggctggagagcagtgttatgatctcggctcactgcagcctccatcttcggggttcaagtgattcccttgcctcagcctcccaagtagctgggactactggtgcgtgccaacatgcccaactaatttttgtattagtagagatggagtttctccatgttggccaggctggtctcaaactcctgacttcaagtgatcctcctgcctcggcctcccaaagtactttgattacagatgtgagctcccgcactcacctggccaaattttttattcttttattttttattttttttgagatggagtctcacttcgtcgccaggctggagtgcagtggcacgatctcagctcactgccacctctgcctcccgggttcaagcgattctcttgcctcagcctcccaagtaggtgggactacaggcgtgcaccaccacgcccggctaatttttgtatttttagtagagacggggtttcgccgtgttggccaggctggtctcgatttcttgactttgtgatctgcccgccttggcctcccaaagtatagggattacatgcgtgagccaccaggcccagcctaaaatttattttattatctgttctttaactagaaccttaggtaaggaggtctgggatctgtgtctcttggctaccgtgcctggcacacagttggcgctccatgaatgcacgcacaatgaagggatggccctgcctggaatctgcctggtaggcgtctagactctggggccccgcaggtgagggataggctcccggctctgccttgtgccagccccaccggtcactcccctgctctatgcctcaacctcctcatcagtcaaacagggatgacagtagtaactatacagggtgatgtgagtgtaaaaccagctaatgtgagccaaaacccggctaatttttgtatctttagtagagacagggtttcgccatgttggccaggctggtttcgaactcctgacctcaggcaagctgcccacctctgcagggtggatcacctgaggtcagggcagagtcgctggaaacagtccatgacacctggcctgagctgtttcttaaaaatatatcagaagggccgagcgtggtggtttatgcctgcaatcccagcactttgggaggccgaggcgggtggatcacctgaggtcaggagtttgagaccagcctggccaacgtggtggaaccctttctctactaaaaatccaaagttagcccggcgtggtggtggatgcctgtaatcccagctactcgagaggctgaggcaggagaattgcttgaacctgggaggcagatgttgcagagtcaagatcctgccactgcactccagcctgggcaataagagtgaaactctgtctcaaaaaaaaaaaaaaaaatatatatatatatatatatatatatatatatatatatatatatatatacacatatatatatatacacacacatatatatatgatatatatataatgtatcagcagtagcacgggtctgacggttcctgattggctccgaggagggggacagctccgggtgaagcctgaggagaatccgccccttctccagaaggaggaagaagggccctgctggtcacacaggacccagtctgcggtgggggttttcccgccaccgccccgccctccctggggcccccacctcaccctctcctggcacccttcaccgtcaacctgtcgggccgggtctgagcaggtctggaggtgggcggggagccctggcctccccacctcctcccgtccccaccctgttcccagcactcaagccttgccaccgccgagccgggcttcctgggtgtttcaggcaaggaagtctaggtccctggggggtgacccccaaggaaaaggcagcctccctgcgcacccggttgcccggagccctctccagggccggctgggctgggggttgccctggccagcaggggcccgggggcgatgccacccggtgccgactgaggccaccgcaccatggcccgctcgctgacctggcgctgctgcccctggtgcctgacggaggatgagaaggccgccgcccgggtggaccaggagatcaacaggatcctcttggagcagaagaagcaggaccgcggggagctgaagctgctgcttttgggtgagtccagggtcggtgggcggtgggtggtgggcagtgggcggtggccagccggcaggggtgtcggggcaaggaggcggatcaggctaggtcagacattggcatcgtggagccgtcgcctcctcccagggaatggggagcctggaacccattttccagatgagaaagactgaggttcagagaagccaagttccttgtccaacgtgcgaccagcggccaggtgcccaggcctgtccactgtgtggggcatatacaatagcagacgtggctctaccgggcccctgccgggcaggcccagcacgccctacctgtctgtgtcatggcgagggaatgatgagctcaggtgtgcaacccgttctggccagcccacccgtaagggaggggccggctccagcctctccttcaccaggacgctccctctcgcctttacctccctgccatggctggagagggcttgtctagggctcctttgggggctagaaaggatggattgattggttcattggttcattcattcattattcattcatttaagatttattgggtagctcccaggaacgaggcagccaaacaggggaagatatttctgtcttcctggatctcatttcctgtgaaggagccaagacatttagtctgtaaactcataagcagataaaataattctggcaacaagaattatctaggagaaaacaaaacagggtgatggcttccatgcggaggcttcagatgggggagtcgacgtcagtaacggttcaagattctgaactctggctgggtgcagtggctcaagcctgtgatttcagcactttgggaggcccaggcgggtgggatcacttgaggtcaggagttcaagacacagccaggccaacatggtgaagccccgtctctactaaaataccaaaaatttgccaggcatggtggctcatgcctgtaatcccagcactttgggaggccgaggtgggtggatcacaaggtcgggagatcgagaccagcctgaccaacacggtgaaaccccatctctaccaaaataccaaaaattagccagatgtggtggtgcgtgcctgtagtccctgctactcgggaggctgaggcaggggaattgcatgaaaccaggaggtggagactgcagtgagctgagatcatgccactgcactccagactggcgacagagtgagacgccatctcaaacaaataaacaaacaaacaaaaccaaaaattagctgggcatggtggcacacagctataatcccagctactcgggaggctgaggcatgagaatcgcttgaacccaggaggcagaggttgcagtgagctgagatcgggccactgcactccagcctggatgacagagcaagactcattgtcaataaataaataaatataaataaaataaataaataaatcatgcctgtaatcccagcactttgggacgccaaggcgggcagatcacttgaggccaggagttcgaaatcagcctggtcaacgtggcgaaaccccgtctctactcaaaatacaaaaaaattagccgggtgtggtggcatgtgcctgtaatcccagctactggggaggctgaggcaggagaatcgcttgaaaccaggaggtggaggctgcagtgagccaggattgcactattgcaccccagcctgggcaacaagaacaaaactccgtctcaaaaaaaaaaaaattctgatctctgaaacctcggggtcttctcattcccgtagcttgtttccccaattacctttccctgattatggccccgttggcctaagcccgggatgctagcctgggagggtcttctgggatccccgagctctgggttgggggctggagaaggtctcaagtcttctggactcgcgtttgtctgccccgggcaaagagcttgatcatcccgtgatggttgctatcgtcctttcctcgttcagtgggaagaggccgcccgagaggaaagagagagaacatcgagtgggatggtggggacccccaggaactgcaccttcactgggggccctttctttcttttttcttttcttatttttatttttatttttttgagacggagtcttgctctgtcacccaggctggggtgcagtggtgcgatctcaactcactgcaacctccgcctcccgggttcaagcaattctcctgtctcagcctcttgagtagctgggattataggcacgcgccaccacgcccagttaattttttttttttttgtatttttagtagagatggggttccaccatgttggccaggctggtctcgaactcctgacctggtgatcaacccgccttggcctcccgaagtgttgggattacaggcgtgagccaccgcgcccagcctctttttttttttttttctttttttttagattgagtcttgctctgtcccccaggttggagtgcagtggtgagatctcagctcactgcaacctccgcctcctgggttcaagtgattctcctgcctcagtctcctgagcagctgggactactggtgcgcactaccacacctggctaatttttgtatttttagtagagatggggtttcaccatgttggccaggctggtctcgaacccctgacctcaggtgatcctaccaccttggcctcccaaagtgtggggattacaggcgtgagccactgcacccagtcaagggccctttcaactctagccttgatccctcttactgaacgagataaaagaatatctcagcagggcatagtggttcattcctgtaatcttagcactttgggaggcctaggtgggaggattgcttgagcttaggagtttcagaccagcctgggcaacttagcaagacccagtctctaaaaaaaataaataaataaaataattagccaggcatggtggtgcgcaactgtagttccaactacttgggaggctgaggtgagaggatcacttgagcctgggaggttgaggctgcagtgagctatgatcatgccactgcactccagcctgggtgacagagcaaagctgactctgtctcaaaaaaaaaaaaaaaaaaatgccgggtgcagtggctcatgcctgtaatcccagcactttgggaggccgaggtgggcagatcatgaggtcaggaggttgagaacatcctggctaacacgatgaaaccccgtctctactaaaaatataaaaaatcagggctgggtgcggtggctcacgcctgcaatcacagcactttggggggccgaggagggtggatcacgaggtcaggagatggagaccatcctggctaatgtggtgaaaccccatctctactaaaaatacaaaaattagccaggcgtggtggtgcgcacctgtagtcccagctacttgggagggtgaggcaggagaattgctctaacttggaggcagaggttgcagtgagccaagatcacaccactgaactccagcctaggcaataagagtgaaactccatctcaaaaaaaaaaaatctatctatctatctatctatctatctatctatctatctatatttgacatattaatgtgtcatattatgtcacattatgacgtatcatatcgatatgtcttattattttaaataaatagggctacttaggctatctacttcttcttgtgtgggttttgatcatttgtgtctttcaaataatttgtccattttgcctgtgttatcaaatttattggcataacatttataacgttcccttgttctcctgctactgtctgtaggatctgcagtgatgtcctctcttttgctcttggtatcgatcatttctgcctttgctcatttttttcttgatctatcaagctaggggtttatcacttttagtgctctttcctcgaatacctcaaggtcatttatccctgacctttgcctggctggccctttcactccatgtaggtctcaacccaagtgtcgcctcctcagagaagtcttccctgactaccctagctataaagacagtcctatcttctccttccccttactctgtttgatttttcttcctggccctcactatttgttcacttgtttattgtttatctctccagctatacagcaagcaacaaaagggtagggaccacatctgtcttcttcatccctgtgtctccagcatctagcacaggtgtacaatgagcctgccatatagtagatgctcaagaaatgctgaatgaatgaatgaatgaatgaatgaatcatttttggggagaacttcccccagacactgtatcatatcttcctggagctgggaaagtcccttccacataccactctgggcactactcagccagcctcaaagcaggaagccccttctactgatggagggcaggggatgacatccatgtccccaggcactgatgtagcactgtggactgtggtttaaaccacctcatccctggagacaggtctgagggcaacctccagacctctgtcccttcttggaaacaggaattgaatccaaaagctgttttttttttacctggaggtggctgatccttttgaggaagatggcaaaaaggaccagggtgggggtgggtctgtccctgacatgaagcaaccctcatattggggaagggggagagtcagaatgaagccgtgagccgggtatggtggcacatacctgtagtcccagttactcgggaggctaaggcaggaggattgcttgagcccaggagttcaagaccagcctggacaacattgcgagacccagtctctaaacaaaaacaaaaaaagaaaagaaaagaaagtgaacaacaacaaaaacaggaaaataaagctgtgaaagggaccagttatgtccttagcactttaaacattttattttttatttttatttttgagacagagtcttactctatcaccccggttggagtgcagtggtgcgatctcggctcacggcaacctttgcctcctgggttcaagcaatcctcttgcctcagcttcctgagtagctgggactacaagtgtgcaccatcatgcccagctaatttttgtatttttagtagagacggggtttcaccatgttagccaggctggtctcgaactcctgacctcaggtgatccatctgccttggcctccccaaagtgacgagattagagatgtgagccattgtgcccggcctgttcttagcactttgaggcaggcactcctagtttcccccaaaggataaactgaggctcagagaggcagagcgacttgcccaaggtcacacagctgagactcgcacctagaattctggttccaaagtccatgctcctgactgccctgttcgcctgccttgggggacagaaacaccacagaaccccagtgccagatggggaaaatgaggcccaaggaggcagcaggattgattgggggtcagcagctagtttgagccagagcgggactgagaggccgagcctcctgcccctgcggctgcctggcctggctccccacttccccagcagctgcgtttcctgtgagggcctggtgctggactctgtgcacatagctggctccagttgccttgtgatgactggggcttggcacggttaacccagttccttcctggcatctgccggttccacttcctcctgtcctcctccgtgcccaggaggaagcaggaacttcccgtctgggccgcatggcctttgggggtatcctaaaacagatcactcccaccatttctatccaggagctgggggatgtctgggggtcggggggcaatggagaggtcccagaatcctttgtggcttcaggacagcaatggattgcaaagagggggttctcacgcagctcttcaggcttcgggtgatgacccatccctgagtcatcaaatctgtgtcgcgggtggcaacaggattatcatttatttcctataacaaagcagaagaggaaaaaaaaatcagtgcatcacaaaataaagccaactgttgcttgccaagacttatgtttgttctctgcactttggggcaaactaagatctgagagttggaagacaactgggggacaggagcccaaaaggtccagtcctggctgggcgcggtggctcaggcctgtcatcccagcactttgggaggctgaggaggggtggatcacttgaggccaggagttcaagaccagtctggccaacatggtgaaacctcgtctctactaaaaacacaaaaattagccgggtgtggtggtgcacgcctctaatcccagctgcctgggaggctgaggcaggagaatcgcttgaacctgggaggaggaggttgcggtgtgctgagatcacaccattgcactccagtctgtgtgacagagccagactctatatcaaaaaataaaaataaaaacaaaaagtaaaaaaaaggaagaagaagatctgagggttggaaggcaattgggggacaggagctcaaaaagtccagtcatcggcagttgggctcaatgccacaccccaaggagctgtcgagcctcccagactctgtaaaaacattgctttaacagacgtgttaatgacacctaccccagctcgactggccgtgtcccattttgttggtgaaggactcacacgaccccaagtttactcccctggggttccacttgctgtgtgacccaaattaagtcactaaacctctctggtcctctgtgtctcatctgcaaatgggaaaatcatagaatctgtgaggattaactggggatccgtagagtctctgggctcggggttgggaagacggtaagatttaaatcatgctagctgtgatttttattatgattgttataatcattcaggcagggtaaaggaacctccaggtataataatttagaaacccataagctcaaggtggctcatgcctgtaatcccagtactttgggaggccaaggcaagtggatcccttgaggccaggagttcgagaccagcctggccaaaatggcaaaaccctgtctctactaaaaatacaaaaattagccggacacggtggtgcacacctgtaatgacagctagtctggaggttgaggcaggagaatcgcttgaaacccatgaggtggaggttgcagtgagccaatatcaagccactgcactctagcctgggtgacagagtgagaccctgtctcaaaaataataataataataaaaaataaaagcccataggctctagactcaaacagaactgagtttgaatcccagtctgccactcaccaggaccattgaaggaattgtgcgacccacagcaattccctcaacggccccgagactgagtttccccacatggaaacagggctaagagttgtccctctcttggccaggcgcagtggctcacgcctgtaatcccagcactttgggaggacgaggcgggtggatcacaaggtcaggagatcgagaccatcctggctaacatggtgaaaccccgtctctactaaaaaaaaacaaaaaaaattagctgggcatggtggtgggcgcctgtcgtcccagctgcttgggaggctgaggcaggagaatggcgtgaacccgggaggtggagcttacagtgagccgagatcgcgacactgcactccagcctgggcgatagagcaagaaagactccctctcaaaaaaaaaaaaaaagagttgtccccctctcgtggtgaggctcaggacagatggtgggactccagctcttagctcaccagggacacccagtcaagggccagcaagctcacaattccctctgctactagccccaaatagccaaagctccaaaaacttgatggtcccccatagtgtctccatgagaaactcaaagaaacgggtgggaggatgtttgtttattgcactgactcccattcctacattccgctgcaggaatattagtgagttgacatgtccccatcctaacatgcaataaattctggaatctgaagctctcacagctctgcatcagagaatttcagattgtggacctgggggatgttgtcgtttgagtagtttgtttgtttatttatttatttatattttatttatttttttttgagtcggagtctcgctctgtcacccaggctggagtgcagtggcatgatctcggctcattgcaagctccgcctccccggttcacgccattctcctgcctcagcctcccaagtagctggaactacaggcgcccgccaccatgcccggttaattttttgtatttttagtagagacggggtttcaccgtgttagccaggatggtctcgatctcctgacctcgtgatccgcccgccttggcctcccatagtgctgagattacaggcgtgagccaccgggcccggccctttatttttattttttttgagacagagtctggctctgtcacccaggttggagtgcagtggcatgatctcggctcactgcagcctccgcctcccaggttcaagcaattctcctgcctcagcctcctgtgtagctgggattacaggtgcgcgccaccatgcccagctaatttttgtatttttagtagagacagggtttttgtatttttagtagagacagggtttcaccatgttggtcaggctggtctcgaactcctgacctggtgatctgcctgcctcagcttcccaaagtgctgggattacaggcatgagccactgcgcccagccctagtttttaattttttttggaaacttttttttttgagacaaggtcttgttctgtcacccaggctggagtgcagtggtgtgatcatggctcactgcagcctcaacctcctgggctcaaatgatcctcctacctcagcttcatgagtagctgtaactaccagtgtgcaccactacgtctgactaaatatatatatatatatatatatatttttttttttttgtagagatggggtctcactatgttgcccagggtggtcttgaactccttggcccaagccgcccccctcccttagcttcccaaagcactggatttataggcatgagccgctacaccatgcccaagcatatacactgttttctgaaccatttttgactaagttgcagacctggtacctttttttatttttttatttttgagatagagtctcactctgtcacccaggctggagtgtagtggcacgatctcagctcactgcaacctctgcctcgagttcaagcaattcttctgcctcagcctcccgaatagctgggattacaggcgcccaccagcatgccccgctaatttttgtatatttagtagagacagagtttcaccgtgttggccaggctggtctcgaactcctgacctcaagtgatctggccacctcagcctcccaaagtgcggagattataggcgtgagccactgtgcccagccgagaaaagcctgtttcttgactttgagccaaatagacatgacccctggagaaactgaggactggagagtcgaggcggccacccccgacctgcccccatggctctccagtgtgcaggtggcacctgctaggtggagttggaggcgttggagacagccctttggggagatgggaggtgacacccccgccccttctccgtgctccggccttctcctctgctcccatttcctctttctgggccccaaccaagccactccttccctttttgctgccgcttgctcgatcaagtcctgcctgcaccgacccctacccccgccctctgcacgccaaccctggaggcagaagcagtcccatcccctctcccatcgctggttggggcccatgctggtgcccccaggagccagacgagatgctgggcaagcctccagcccccacctcccacctggtggatcatacccattttacagatgagaaaattgagacacagagagggggaagggcagccttgggatgtcagagcttagcggggggctgagctggtgtctttgaacctctagtcccaggctcttgaagactccagcatcagtatcccggacccagggccggtttggcaggtgcgcgaactgggctgtcccagagggttccaggctcagaagagcctgaagtttcagcttgcacccagccccagaaaatctgtggctggccctgcaaggaccctgccagattttgtaccatctgtcagcaaggtcaggtcgattctgtctccccagtgtctctcaaatatgtcctctcctctccagctccatgacagccacattggtccagccccacggttgctcacctgaaccaacgcagtccccactgccctggtccgggctcccccagaccaccccccacagcctgtcctccctgcagcagccaccagagggcgcctgtgagcacctgagtcagggccagtccctcctctgcccacagccctccatggctcccaagtccctcagggtcaaagcccaagacttccctgcaacccacaaggcccagcacaacccaccctcccctccttcctctctccccctcctcactctgctccagccacaagggcctcctcactgttcctccaatatgccaggtgcggccctgccccagggcctttgcacaagctgttactgtcacctggtgtgccctctaagattttgacagccaccttccggccttcacaaatcactttcactgagaggccttccttgactgctcacaaatcacttccactgagaggccttccttgactgcgtggctatcgtagtcacctaattactccttgccctatttatcctatgttatttctttcgtaaaagtttctctacctgaaattattgtagcaaataataatacatattagtattgttatgataaataataaaaataggccaggcacggtggctcacgcctgtaatcccagcactttgggaggccgaggcagacggatcacttgagcccaggaatttgagaccagcctggctaacatggtgaaaccacagctgtactaaaaatacaaaaattaactaggcgtggtggcacgcgcctgttaccccagctacttgggaggctgagggaggagaatcacttgaacctgggagccagaggttgcagtgagctgagattgcgccattgcactccagcctgggcaacagagaatctgtctaaaaaaaaagaaaaaaagaaaaaagaaaaaaacccataagaaccataaccataaaaagtattaaaaacacaaaaactggccaggcgcggtggctcacgcttgtaatcccagcactttgggaggccgaggcgggtggatcacgaggtcaagaccacggtgaaaccccgtctctactaaaaatacaaaaaaattagccgggcgtggtggcgggtgcctgtagtcccagctactcagagaggctgaggcaggagaatggtgtgaacccgggagacggagcttgcagtgagccgaggtcgcgccactgcactccagcctgggtgacagagcaagactccatctcaaaaaaaaaaaaaaaaagaagagaaaaagaaaacaaaaacaaacaaaaactttctggccacacaaagataactggatctggccctcaagcagccggagtttgcgacccttaccgtgagcattttataatcaattcatttggccctcagtttgatgcagcaggcatggtctgttgaggtccatgttttgttttttttgtttgtttgttttgtttttttttgagacagaatctcgccctgtcgctcaggctggagtacaatggtgtgatctcagctcactgcaatctctgcctcccaggttcaagcgattctcctgcctcagcctcctgcgtagctgggattacaggcgtgagccaccacacccggctaattttgtatttttaatagagatggggtttcgccatgtttaccaggttggtctctaactcctgacctcaggtgatccgcctgcctcagcctcccaaagtgctgggactacaggcatgagccaccgtgcccagcctgaggttcatgttttacagatggggaaaccaaggcacagagcggcaaagccgctagcctagggtcactgagtgaggtcccggctgcaccggggtttgaacccaggaggcctggcgtggagttgggggtgtctgacgtggggttgggggtgtcgggggtgggagtcccgtggagggctgagcggttctgctgctccatccccaggcccaggcgagagcgggaagagcaccttcatcaagcagatgcggatcatccacggcgccggctactcggaggaggagcgcaagggcttccggcccctggtctaccagaacatcttcgtgtccatgcgggccatgatcgaggccatggagcggctgcagattccattcagcaggcccgagagcaaggtgagccgccagggcaggcaggggcccagggcaggcaggggcccagggcagggttccccagaccccggagcagggccaagttccccagacttcagggcagggcagggcagggcagggcaggcagggaagggtccccagaccctggggcaaggccatgtcctccagacatatgtgcatacatacaagtgcacacacaagtatacacgcataaatgcacacacgcacatgtatgcacacgcacagacatgcacacaaggacacacacgtacatgctcacaaagatacacacgcatgcccacatgcacacacccacacacatacacaaatgaatgcacacacgtgcacacgtgtgcacacacacaaatgcacacaaggatccatgcagatgcccccacacagatgcacacaaataagtgcacacacaaatgtacacactcaaacacgcccatgcacgtgtacacactcacaaacacacacaagaatgcatgcaaattcccacatgcacacacacacatgcacatacacaaacacacacaagcatgcatgcaaattcccacatgcacacacacacatgcacatacacaaacacacaaggatacacacatgcctgcatgcaatccccccatgcacatgcacgcacatgtgtgcacacatacaaatgcacacacaagcacacctatgcacgcacccacaaatgcagccaaggatacatgcgcgtgccccacacacaaatatgcaaacaaatcacacacccagacacacccatgtacatgtgtacatctatacacacacacacacgagcacgcttgtacatgaacaaacacagagaaatgcacacacaacactcagagtccatcacaaaggtctgagcaacgcgagtgcctggggggagctagggctgtttggggaaaagaaggggaaacccagagtctggggggcagctcagggttcacgcgcctctgggggacttctgaggggcagattgcttcagtgctctgtgtcttagtcgcttcatctgtggaaggggggactgtgagtgccgtgcttcctgggagccagctagtgtaaagagcggggctgggtgccatgctccccctgagcctgggctcgcccgagcacatgtgccctctgcagcccctcatgtggtggtctgtgcttttccctctggggatccatgcaagaacagacggaggacaaatcagaagtgtgcgggggggtcgggagctctggggaagaaggagagcagtgggaagagagcgtgtttcagggagggacgtgggggcttgcagagatgcctgcggagggcagccccactcagaaaggctaccctaactgcccccgtcctccctccccagcaccacgctagcctggtcatgagccaggacccctataaagtgaccacgtttgagaagcgctacgctgcggccatgcagtggctgtggagggatgccggcatccgggcctgctatgagcgtcggcgggaattccacctgctcgattcagccgtgtagtgagtctggggtctgcgggggatgggcgcgtggggaggggctgagggcaggggccaggctggctggcttcctgcagcaggagatattgtgggcgcagatgggctgtgaggtggtcctgctccaggatgaggtccttccagggggaccctaattcccgggggaccctgttctgggggtgacccttttcctgggggaactcccttcatggaatgaccttgttcctgggtggaccctgttccttgggactctgttctggcggtgatcttgttcttggaatgaccctattcatagggggactctgttctaggagtgactctgttcctgagggaatccagttccttggggagaccctgttctagggggtatcctgttcctagagtgaccctgtgcctggggttccctgttcctgcgaggaccctgtttcaggggtgaccctgttcctgggggaaccgtattcctagagtgaccctgttcttggggggaaccctgatcctggggggaaccctattcctggagaaccctgttcctggagtgaccctgggccttggagtccctgttcccgtgaggaccctgtttcaggggtgaccctgtttctggggggaccctgttcccgggggtgactctgttcccagggagaccctatttcctgggggatcctgttctggcgttgatccttttcctggagtgaccctgttcctaggggtgatcctgttcctggggggactgtattcctagagtgaccctgttcttggagggaccctgttcctggggggaccttgttcctgggggaaccctattcctagagaaccctgttcccggagtgaccctattcctggcgggaacctgttcctagagtgcccctgttttagaagggacccttttctgggagtgaccctgtttctgaggggaccctattctggggggaccctgttcctggagtgaccctgttcctggggggaccctgttcctaaagtgaccctgttttaggggggactctgttccaggggagaccctgttctgggggtgaccctattcctagtgggatcctgtactaggtgtgatggtggatgtccaaggtggcttgatgtctgggaagactgttcccaggctaccagcattcttggggtagcgccacccctgccatagcagctctcccgggggacaccactcctcgatgaggccattcctcatgtcacgccatccctcgggtcaccctgctctgcgtgtgaagctgcttttccttggggctccattgcctcaggtgggggacgctcctgggccatctgccaactccagggaccccacctccacccagggagctctcctcccccagcagggtccttgctgggcctttcgtagggcctgggaagcaaagggaggctggctgcaaggctgggcctcaggactccttgctctgcagctacctgtcccacctggagcgcatcaccgaggagggctacgtccccacagctcaggacgtgctccgcagccgcatgcccaccactggcatcaacgagtactgcttctccgtgcagaaaaccaacctgcggtgagcgctccacctaggcccagcctagggggcagggaaggcttcctgtaggaagggcaaaggagctggggccctgagggatgagtaggagtttcttaggcccagccttcaaggagctgccaagctaggggaagcaaagctccatgtagacacctccaggcccccaggtagtcaggactgggacctgtaggagcccaggctgaggcatcagagatccaggagggaatatcttcttggaggagggaatattaatggggttttgaaagacgaataggagttcagtagtcctaaccctgaaggggctgctggggaggaggaaatagagactatacagtcaggaccaggtctggggaggcctggtctggggagctcagaggtgatccctgtagtcatcaacactgggggatggactagagtgtgaggctggaagtcaggaaactcagaaaaaggaggagccaggacagcgggcgtggggatggaaaggaagggatgggcaagagttgtttctgatgtggaatgggcaggactggatgagtgtgggaattagaacaggaagtcaaaaatgacacctgagttttttgtcaaggtgatgggggtagacagtggagccggtgggctagaggatgaaaaggtggtgatggagtcctttgggacaggttgagtctgaggggcctagggggactccaccttagctggcagacagaggtgggaatggccagtgcagcaccctaaccctaaccctaacccagcagagcaatggccaatgtcaaaggtcaggaaaggaaaggtcaagaatacagtgagaagaatgactctgggattggcagttagagggtcactggtgaccttagcaagatctgtttccatgggctgatggcggggagctgagcaggggtgcaaagtcatgcccagagacagcgattgtgtttgacctacccctatttggccttcctttccctaaatcccccaaacctattgttttggcctcttcaatagtccttactaggaaggttcataatttatctgttttctgtgggtctcctctacaagatggagagcctcacaaggttaggggctgagtttgattcttctgcttctttagtgaatagctaaaggtcagagtagaagttggtaaatgtgggtggatggttggaaagatggaatgggggcaacccgctcgggtccccttccacgctgtggaagctttgttctttcgctcttcacaataaatcttgctgctgctcactctttgggtccacaccacctttaagagctgtaacacttactgcgaaggtctgcggcttcattcttgaagtcagcgagaccgagaacccacgagaaggaaccagctctgggacacaatagtagtgttagtacccaaggatgacttctatgggagagatacttggtctgggaatctttaaaaaaaaaaaaaaaggaaagatggaagggaatggatgggtggatgaatgggtggatggatagatgaatagatggatggataagttgagggatagatgagtggatggatggagtggcaggatggatgagtggatgaatcaatggatagatggatgagtgggtggatggatgaatggatggatagatggatggattgaaagagggatgagtggatggatggatggatggatggttagatgggtggatgggtgatacatgaatggatgagtgggtggatgagtggatagatggatagatgggtggatgaatgggtggatggatgggtgaatgagtggatggatgaattaatgggtagatgggtggaagggtgatgggtgaatggatgggtgggtggattggtgagtgaaggatggatggatgagtggatagatggatgggtgggtgggatggatgaatggatggatgaatgggtgggtgaatgcatggatggatgggtggatgagtggatggatggatgaatgaatgggtagatgggtggcaggtgatggatgaatgaatgaataaatgggtgaatgggtgagtgaaggatggatggatgagtgggtgaatggatggatgaatggatgagtggatgggggtgtgggtgggtggatgggtagatgggtggacgagtgagtggatagatgggtagatggatgtatgagtagatggataatgggtgaacagatgggtggatggatagatgagtagatgaagcgatggatggatgggtggattgagtaaatgggtggacaggcaggtggatgatggatggatgaatagatgggtagatggatagacggatagatggatggatgagtgaatgaatagatggatgggtggatggatagatggatggatgggtgggatggatggatggatggatggatgaatgggtggatggatgggtggatgagtggatggatggatgaatgaatgggtagatgggtggtgggtgatggatggatggatgaatgggtggatggatgggtggatgagtggatggatggatgaatgaatgggtagatgggtggtgggtgacggatgaatggatgaatgggtggatgggtgagtggatgaatggatgagtggatgggtgggagggtgggtggatgggtacatgggtggatgagtgagtggatagatgggtagatggatggatgggtagctgggtaatgggtggacagatgggtggatggatggatggatgagtaaatggagagatggatgggtgggtcggtgggtggatttcgtaaatgggtggacaggtggatggatgatggatggatggatagatgggtagatggatagatggatggatgagtgaatggctggatgggtggatggatgggtgggtggatggatgatggatggatggatagatgggtagatggatagatggatggatgagtgaatggctggatgggtggatggatgagtgggtgggtggatgggtggatggatgagtgaataaatcgatgaatggggtgggtgggtggataaaagtttaggagtgaaggtagaggctgggaaatcatggggaagtctgggccaaggaagtgatttttaggtgtggcccaggagtgagacgaatgaatggagtgagggctcagaggacactgagacccgagatgagaggtgatgcccacagttcccaactggtcagttgctgatcccactcccgtctcagtctccagagccccctctcgacggctgcttaccctgtctggctctggatgtggggtttgagggactctgaggatgcatgggaggagtgggtctcagggatcaggagacacatccagcagctgcagcctaactgcttcatcatcagtcccggtttcccctcctgtgcaatggggcaagtcccttcttgcttgaggccctgggccgggcccgtccaaagcctctgttctgggacttcctgagtaacggttgcatccccagggaaatgacgcacagatggttatcagcgacccacatttctcagaagagagagaacaggaaggtgggggcagggttcaggcttttgttacggtgcgtggggctgagtcacagatggaggggaggacgtgtgctctgggaacagccctcattcccatctgtgtggccactggacatgcccatggccagccagagcacaggagccccatagcacagatgggaaaactgagttttggagatgtttggcaatttcctccgccgggtcgcccagccagcaccagggcacatctcagatctgtccaacctgctcccctctaatatgggggtagaaagcaggcagcccagcacagtagaagcttgggaaagtccccgctcctccctggatctcaggcttctcatctgtaaaatgggcgtaagactcatccttgcctcgcgggaatgacatggcaaatccacgagaggctagcacctattcttgctgtcgctattatggatcttggcatatcccagacgtgatgggggttgggggtgtcacggagcaggctcctgagctctgaaagggggcacctcggttccctgtaggatcgtggacgtcgggggccagaagtcagagcgtaagaaatggatccattgtttcgagaacgtgatcgccctcatctacctggcctcactgagtgaatacgaccagtgcctggaggagaacaaccaggaggtgcgccaccgcctccctcgccctgcccacttgttggcccagggaccctcacctgagcaggaagctctggtgcagaaagggagggatccctgctcttgaacgggcctgtgtgtgcccagcatggctatgaacttgacccttcagccttttgtggtcagattgcagcaacccaagacacagacctacagcatttgtttggtcaggaccccagacacacacacacacacacacacacacacacacacacacactacagtgcacacacgcacatacacaatgcatgcacacaaacacgcacagacacgtgcataatacatgcacatacacacgtgcacacacgggacacatgtacacacgcagtgcacatgcacaacacatgcacacgaacacacatgcaccacacacatgcacacttgcatgcactcacgtgcacaatacacgcatatgtacacatgcgcacacacatgaacacacacatgcacacacacagtacacacatgcacacgcacacacaggcacacacacgcacacacaggcacacaggcacacacatgcgtgcacacacacatgcacgcacacgcacaggctggagtgcagtggcgcgatctcggctcactggaaactccgcctcccgggttcacaccattctcctgcctcagcctccggagtaggtgggattacaggcacccgccaccacgctcggctaattttttttttgtattcttagaagagagggggtttcaccatgttagccaggatggtctcaatctcctgacctcgtgatccgcccgcctcggcctcccaaagtgctgggattacaggcgtgagccactgtgcccagccaatagcctcttttaataagtacaccagtcgtctaggatcagggcccaccctactccagtacgacctcatctgggttaattcctcgtgtgatggccctgtttccaaagaaggtcacaaactgaggttctagggggttaggtcttgaacgtatgaattttggggaaatatgatgtaccccataacacaaggcatttgagaccttattgtacttttttttttgagatggagtctcgcttttgtcgcccaggttagagtgcagtggcgcgatctcagctcactgcaacctccgcctcccgggttcaagcgattttcctgcctcagcctcccgagtagctgggtttacaggcacctgccatcatgcccggctaattttttgtatttttagtagaaacggggtttcaccatgttagccaggctggtctccaactcctggcctcaggtgatctgcccgccttggcctcccaaagtgctaggattacagccgtgagctgccgcgcccggccaggtctccctcttcttatgaggacagcagtcacggacttgagggccaccgtattctagtattgcctcaccttaacgacctcttcaaagaccctatctccaggccaggtgcagtggttcatgcctataaccccagcacgctgggaggccaggagttcaagaatctctctccagataaggtcacactctgaagctctggggggacatgaatttcgggaggacacacttccaaccagcacaggcacaaaaccatgtcaggcacacccaggcagctgtccatatggaaacacgggcacacccgcctcagccccagccaggcagataggggtgagcccatgcccctggagccaacagccccgtctccgcgatgggagggtttcctgtcccacctggctggttgaagcactaacctgcttctgcccccaacacagaaccgcatgaaggagagcctcgcattgtttgggactatcctggaactaccctggttcaaaagcacatccgtcatcctctttctcaacaaaaccgacatcctggaggagaaaatccccacctcccacctggctacctatttccccagtttccagggtaagtaattctagaactttctatacccttcaactcccaaaagcagctccgaagagagatgctaatccagactctacttcagcctggagtcaccggaactttcacataggatcagacccgcgttctagactcagctccatccactgcccgacctcattgaatctgttttcccttctgtggaatggaataaaatagcagaggcccttggaactgagtaaagtgaggaattctaaaaacacgtagcatatcacgtacaccttaaacattttatttatttatttatttttgagacagagtcttgctctgtcaccaggctggagtgcagtggcgtgatctcggctcactgcaacctttccctccagagttcaagcgattctcctacctcagcctccctagtagctggaactacaggtgcgcgccaccacgcccagctaatttttgtgtttttagtacgaaaagacgggatttcaccatgttgaccaggatagtctcgatcacttgacctcctgatccacccgcctcagcctcccaaagtgctaggattatagacaggagccaccatgcccggccaaacattttattttatgcttgttggccaacatttggggtttgagccaagatccttcaagcatgggtttgctatgtagaggtcactgttgtaaagcacttctggaaagattgtctactatttccagaatctgcctaggttttaagaatgattctttttcttttctttctttcttctattttttctttttgagacagagtctcactctgtcacccaggctggagtacagtggtgcgatcttggctcatggcaacctccaactccccggttcaagtgattctcctgccttagcctcccaagtagctgtgattacaggcacgtgccaccaagcctggctaatttttagtagtttcctgtcctatttttagtagagatggggtttcaccatgttggtcaggctggtctcgaactgacctcaagtgatccacctacctcagcctcccaaagtgctgggattacgggcgtgagccaccgcatctggccataacgtttctttttctaatctttcatagtgatctcatctatccctaattggatagcaatttctttttctttaatccattttttctttaatttttttttgtttgttttttgagacggagtctcgctctgctgcccaggctggagtgcagtggcgcaatctcagctcactgcaagctctgcctcctgggttcacaccattctgctgcctcagcctcccgagtagctgggattacaggtgcccgccagaacgtctggctagttttttgtatttttggtcgagatggggtttcatcatgttacccaggttggtctcaatctcctgacctcatgatccacctgtctcggcctcccaaagtgctgggattacaggcgtgagccatcgtgcccagtctattttttctttaatttcttttctttttttttttttttttgagatggagttttgctctttttgcccaggctggagtgcaatggcacaatctcggctcaccgcaacctccgcctcccgggttcaagggattctcctgcctcagcctcccgagtagctgggattgcaggcatgagccaccaccccggctaattttgtgtttttagtagagacggggtttctccatgttggtcaggctggacttgaactcccgacctcaggtgatccacccgcctcggcctcaaagtgctgggattacaggcgtgagccaccacacctggcctttctctttaatttttaaagcagagctttgaacaatgtttccaaagcacacagcttagttttgtaatacaatgaccttctttcatgcggcacttgtagctacagatttgcataacgtttcttttaattacatatgaatcaagacacgtacaatgggcaaaaacaggtttgggaacaaactctcagtccatccagagggtgaaagggccacagggcaactacagagaaacaccatctagtgttgggcaccacttagtatattttacaaaggggaggcagagttgtggttaatccagggaccaacgtggggaaggtacatattcactagcactttccccagaacaccactgtgaggataaagtgtggtggcgggtgtcctgcttagctactgccgagtaacaaaccatccccaaacttagtgacttaaactggtcattttcctttgcttatgattttgtgggtcaggaatttgggaaaggttgagctgggtaagttcatctctgatccatgtgacatcagctgggctctatgggattggagataaacttccaagatggcttcttcccccatatgtctggtgccttggtgctcttggcactcttggcctctctctctgtgtctctccctgcctccctctcccatctcatctctctctcctcccctttctcctagtctgtctctccttttccacctcccctgttctctctgtctccatctggggcctcatgatccacagcctcttcacatggtttgagcttactcacaatatggctgcctcagggtagacagacttcagcccaggtggaagctgcttctcatgatagcctcagaaatgtcagacgttactctgccacattctatttgtcaagcacatcactcatatcagcccggattcaaaagaaagagactccatctcttgaaggcagcatgacacatgcatacagggagggaaggaagtgacggcagccatcttggagataacttgccttcatgtcctggggatgccgtaacaaagtaccacaaactgggtggcttaaaacaacaggaaacaacagaagtccaaagttaaggtattggcaaggttggttccttttggaggctctaagggaaaatccattccatgcttctctctcagcttctggtggtggcctacaatccttagcttgtagacatatcactgcaatctctgcctccatgttcacatggctgtcttctcaccatgcctttatgtgtcctctcctgttgttataaggccaccagtcattggatttagggcccatactttggtatgaccactttttttttttttttttttttttgagacaaggtcttgctctgttgcccaggctagagtccagtggtgtgatcacagttcactgcagcctcaacctcctgggcacaggtgatcctcccacctcagcctcttgagttgctgggactacaggcgcacaccaccacacctgggtaatttttgtatatttctgtagagacagggtttcgccatgttgcccaggctgatctggaactcctgggcccaaccacacatctgtcatccacctgccttggccttccaaagtgctaggattacaggcgtgagccctcatgcctggccatgacctaatttaacttaactaattacatctgcaaatatccgatttctaaaagtcatattctgaagttccaggtggacatgaattttgggggacactgttcacctcaatatacaagcaaccatagtagatgagtccttagtacatgcttgacaccaggtccacaatcagtaaacataaactttggtgaagtcaccaggttttgatccctggtcttgtcatgtctcagagcccatgaggccaattttagccaattatacccacaagattcagggtctgggagatagacgtcaagttgttccaggatggtggcctggatagcccctcttccttgccaagcagccctgggaatcagctcatagtttagagaatttgggaacaggataaggtagatatttttttcattcaggtcaaagggaaccacccatgactcatccttgtctcccagcacaagtgactggtgcactctttgctgactcccagccctaccctccactgtgctaaataatatttgtgataataataagaaaccacactttgggaggctgaggcgcgcagatcgctttaggtcaggagtttgagaccagcctggccaacatggcaaagccccatctctgttaaaaatacaaaaattagctgggtgtggtggcgggggcctgtcatcccagttactcgggaggctgaggcaggagaatcgcttgaacccaggaggtggaggttgcagtgagctgagatcatgccacttcactccaacctgggtgacagagtgagactctgtctcaaaataataataataataataatgataataataataaaattgataacagcagctaacacatctaccgcactggtggaagcactctacaaagcttctttaatcttcatgttaaaaccctatgcagggctgggcacagtggctcacgcctgtaatcccagcgctttgggggggtcaaggcgggctgatcatttgaggtcaggagttcgagaccagcctggccaacatggcaaaaccccatctctactaaaaatacaaaaattacctgggcatggtggcaggcgcctgtaatcccagctactgccaagattgcaccattgcactccagcctgggcgacagagcgaggccccatctcaagaaaaaaaaaaagaggactctcttcccctcgtttggccttgatgccgccatcttcacagtcctgggatatttgtctatgcgattccagtcttccaactgcactggctgtaagcgaggccaagagagtgtctctctttaacacagttctgcccgaagtcccagagctgggtctcattggtccatttcaggtcacatgactcgtgtgagacaatctcctgtgttcccattggctgggccggagtcgtgtgaccagctatgactacaaaagatggagtcaacgcacagaaaaatgacaggcgcgatccctgggtcccttcagtgctggttacagggaagagggtctccagaggccccctgggtccaaagagggagggtcctcacccccttcccacactgtttccccaggccctaagcaggatgctgaggcagccaagaggttcatcctggacatgtacacgaggatgtacaccgggtgcgtggacggccccgagggcagcaagaagggcgcacgatcccgacgcctcttcagccactacacatgtgccacagacacacagaacatccgcaaggtcttcaaggacgtgcgggactcggtgctcgcccgctacctggacgagatcaacctgctgtgacccaggccccacctggggcaggcggcaccggcgggcgggtgggaggtgggagtggctgcagggacccctagtgtccctggtctatctctccagcctcggcccacacgcaagggagtcgggggacggacggcccgctgctggccgctctcttctctgcctctcaccaggacagccgccccccagggtactcctgcccttgcttgactcagtttccctcctttgaaagggaaggagcaaaacggccatttgggatgccagggtggatgaaaaggtgaagaaatcaggggattgaggacttgggtgggtgggcatctctcaggagccccatctccgggcgtgtcacctcctgggcagggttctgggaccctctgtgggtgacgcacaccctgggatggggctagtagagccttcaggcgccttcgggcgtggactctggcgcactctagtggacaggagaaggaacgccttccaggaacctgtggactaggggtgcagggacttccctttgcaaggggtaacagaccgctggaaaacactgtcactttcagagctcggtggctcacagcgtgtcctgccccggtttgcggacgagagaaatcgcggcccacaagcatccccccatcccttgcaggctgggggctgggcatgctgcatcttaaccttttgtatttattccctcaccttctgcagggctccgtgcgggctgaaattaaagatttcttagaggctgcgtcgccagcgtcctgtttatcccctctgcattcctttctcggcttacgtgtcccgggggcagtgcttacagtgcggggagcaacgtggagtaggaaggaaaaaagttatacttcttgtctacccacctgtcctggccatggtacccagaactgtggaggctgtgagtcccgcaagccgggacgtggagtccaacctccctcccaggctgggggggacattgaagcagactcctccgtggctactgacctgaaattccagtagcagcccccacccagctttgagaaggcctcttactatcctcagggcagtgttctggggtgcaagccgtagcaccccactttacaggtgaggaaaccggggcgcagagaagtggagtaatttgactaagctcacacacctggaattgacagaggcaggagcctgttcctacgttgaacacatttgtggttttttatttgtttgttttttgagacaatctcacttggttgcccaggctggagtgcagtggtgcgatctcggttcactgcagcctctgcctcctgggttcaagtgattctcatgcctcagcctctgcagtagctgagattacaggcacccgccaccacacctggctactttttttttttttgatggagtcccgctctgtggcccaggctggagtgcagtggcgcaatctcgtctcactgcaacctccacctcccaggttcaagtgattctcctgcctcagcctcctgagtagcttggactacagttgtgtgccatcacacctggccatatttttgtatttttagtagagacagggtttcaccatgttggccaaactggtctcaaactcctgacctcaagtgatccgcctccctcgacctcccaaagtgctgggattacaggcatgagccaccacacctggcctaatttttcttcttataaaaacactagtcacactggatcagggtccagcctgtcatccccatcttaacttgattacatcggcaaagaccgtatttctaaataaggtcccattcacagataccgggggttatgacttcatcatatctttgtaggggagccacatttgaacctataaaaggtattttgtaatacaaaaaggagccgggcgtggtggtgcatgcttgcaatcccagctaattgggaggctgaagcatgagagttgcttgaacccgggaggcggaggttgcggtgagccaagatcctgccactgcactctagcctgagcgacagagtgagaccttgtctcaaataataaataaataaatacataaataaataaataaatataaaagtatgttatagaaaccctctccactgagtttggtctgacattttgctgctggtcagactggggtgatgggtttcagggaggaagacctcagtggtgacagcccttctcaccacatcctatctttctgttttttttttgagacggagtctcactctgtcacccaggctggaagtgcagtggtgtgatctcggctcactgcaagctccgcctcccaggttcacaccattctcctgcctcagcctcccgagtagctgggattacaggcgcccgccaccacgcctggctaattttttgtatttttagtagagacgggctttcaccgtgttagccaggatggtctcaatctcctgaccttgtgatccgcccgcctcggcctcccgaagtgctgggattacaggtgtgagccaccgcgctctgcctcttgttgttgttttgtaagaattttagactcacagaaaagttgcagaagttgtacacagttcccaaatgccctccacccagcttcctcttacctcttacgtaaccctagtacaacccaggaaattcacatcagcgagcgtcctatgaacgaacctgtgtgtagaccttactagaatgtggcgggttctcgctcccgtcctcctttcctggaccaggatccaatcccggatcccacatcgccatgagctgcctccctctcctcattctggggcagtgcctcagtttcctttgtgacacgtcggaggagttttgcttggttgtttcttgagccgttcctcaggttgggttggtgtgaggtttgctggtgacagaaagggatgtcagagccactcagggcatcacctgactgggttcatcatgacaaagtggctcatccctggcgatcatacgttgcggatgtcttttcaccattggttggtcggagtcaggacccaaacaaagcccgtgcgtggcgcttgggtgctgtgtctcttaagtctctttcctctttttttttttttgagacggagtcttgctctgtcacccaggctggagtgcagtgatgcgatctcggctcactacaagctctgcctcccgggttcatgccattctcctgcctcagcctcctgagtagctgggactacaagtacccgccaccacgcccgggtaattttttgtattttttagtagagacggggtttcactgtattagccaggatggtcgcgatctcctgaactcgtgatccaaccgccttggcctcccagagtgctggaattacaggcgtcagccaccgcgcccagcctcctcttttttttttttttttttgagacagagttttactcttgtcacccaggctggagtgcagtggtgtgatctcagctcactgcaacctgcacctcctgggttcaagcgattctcttgcctcagcctcctgagtagctgagattacaggcatgcgctaccacacctaggtaatttttatatttttagtagagacggagttttgccatgttggccaggctggtatcgaactcctgacctcaggtgatcctcccgcctcgacctcccaaagtgctgggattacaggcgtgagccactgtgcccagccatgacccagtgggtcttaagagttttttgactgggcacagcgagatgcttttaactcatcctttactttgtcagcttcagatctgcactggatcgtttctccaaggagccctctttcctttgaatgggagatgatatttagagaccacaatctgagcaccaagtgaggaaacacatcttgtctttttttttattattatactttaagttctagggtacatgtgcacaactgtgctggtttattacataggtatacatgtgctgtgttggtttactgcacccattaactcgtcatttacattaggtatttctcctaatgctatccctcccccctcccctcaccccacgacaggccccggtgtgtgatgttccccaccctgtgtccacgtgttctcattgttcagttcccacctatgagtgagaacatgcggtgtttggtttgctgtccttgtgatggtttgctcagaatgatggtttccagcttcatccatgtcactacaaaggacatgaactcatccttttttatggctgcatagtattctgtggtgtatatgtgccatattttctttttctttttttttgagacggagtctcactctgtcacccaggctggagtgcagtggtgcaatctgggctcactgcaagctccgcctcccggattcatgccattctcctgcctcagcctcctgagtagctgggattacaggcgcccaccagcaagcccggctaattttttgtatttttagtagagacggggtttcaccgtgtcagccaggatggtctcgatctcctgaccttgtgatctgcccgcctcagcctcccaaagtgctgggattacaggcgtgagccatcacgcccggcctgtgccacattttcttaatccagtctatcattgatggacatttgggttggttccaagtctttgcggaaacacatcttttgttcgcttatttttagtgcaaaaatatttgaaacctacagaagttacaaaaccattacaatgtattcccctgtatttttcatccaggtcaggagccggcaaactgctacccacaggccaaatactacttcaattgcttttgtaaagttttattgaaacacggtcatgtccattcatgtacctgtgtctacgcaggctgttcctgcatccatggaattgagtaactgccactgatactgtctggccccaaaagccaaaaatatttactatttggcctttttgttttgttttgtttgttttttactccccttaaagacaaggtcttgctccgtcacccaggctggtgtgcagtggtgcaacctcagctcactgctgcctccaactcctgggctgaagggttcctcctgcctcagcctccccggggattccaggcataagcccctgtgtccggccaggtgtgagttttcgagtggacatgcttgcattcctcttgagtgtgaccctagcgacagaattgctgggtcatgtgctgaggtcatccatccatttctaacccagggttggccggcagcagcccctccgagctggctcctgtgttctttgccaggtcctcctccctctgtgatcacgccctccctctctggcacactgagatgttccaggctcatctcctgccctactcttggaatcaacccttcctcccaggttccctggatcctttcagcaaggggctgtagggggagggaggtgatctttagaagccacgatctgggcactaggtgctccttgctctgggattgtctcagtggaaagttaggacagggtttttttatgttttttgcataaatcatgagatcctgaattcacactgatatttgcaatcctttctttttttttttttttgagacagagtcttgctctgtcactgaggctagagtgcagcagcacgatctcgactcactgcaacctccacctcctcggttcaagcgattctcctgcctcagcctcccaagtagctgggattacaggtagtcaccaccgtgcctggctaatttttgtatttatttatttatttattattttttttttctgagacagagtctcgctctgtcacccaggctggagtgcagtgccacaatctcggctcactgcaacctccacctcccgggttcaagcaattctcctgcctcagcctcctgagtatctgggattacagcagtgcaccaccacgcccagctaattttttgtatttttagtagagacggagtttcactgtagtggccaggatggtcttgatctccggacctcgtgatctgcccacctcggcctcccaaagtgctgggattacaggcatgagccaccgtccccggtctaatttttgtatttttagtagagaaagggtttcaccatcctggccaggctagtcttgaaatcctgacctcgtgatccacccgccttggcctcccaaagtgctggggttacaggcgtcagccaccgtgcccggtccaatttttgtatttttagtagagacagggtttcaccatcttggccaggctagtctcgaaatcctgacctcatgatccacccgccttggcctcccaaagtgctggggttacaggcatgagccaccatgccaggcctttttttttttttttttaagagacgggatctctctccatcacccaggctggagtgcagaggagcaatgatggcttaccacggcctcaacctttcaggctcaagcaatcctcccatgtcagcctcctaagtagctaggaccacaggtgcatgccatcacacccatgttatttcatttttattttttgtagaaatggggtcttgccgtgttgcacaggctgggaaacttgaagtcctatttaaccctgcaagggttctttcttgctttctcccaggtcatatttacatctttctctcccagcaaagaccctagttcctaataatatctttgtatttgctactttgctcagtcctgtaaaacacatgatagtttcaaaattgctccacccatacgttccccaatgacaaatccgctaaataaaggtcaaagtttctttgcaattatttttgtctctcttcttcttcttttttttttttttttttttttttttgagacagagcctcactctgtcacccagactggagtgcaatggcacaatctcggcttacggcaacctccgcgtcccagggtcaagcaattctctgcctcagcctcctaagtagctgggattacaggcacccaccaccacgcctggctaacttttttctttttttttttttttgagacagagtctcccactgtcacccagactggagtacagtggcgcaatctcggctcactgcaacctctgcctcccgggttcaagcgattctcctgcctcagcctcccgagtagctgggattacagatgcccgccaccacgcccggctaatttttgtatttttagtagagatggggtttcgccatgttggccaggctggtgctgaactcctgacctcgtgatccacccgccttggcctcccacagtgctgggatcacaggcgtgagccaccgtgcccagcctctttttgtctttagagtgagtactgtgtatacaagttccgcgggctgattcttttctatctctatgtggttacgtttttcatttgaaatacagtttggttcatttgttttctactgttattccatcttaaagcttttccctccatccttgttgatcaattttatctttcaatatagaaagcacgaatagggcttaaaactacacaaaaggccaggcatggtggctcacgtctgtaatcccagcactttgggaggctgtagcgggcagattgcttgagcccagcggttcaagactagcctgggcaatatagcaagacctcatctatacaacaaaacaaaacaaaacaaaacaaaacgcctgtaatcccagtactttgggaggccaaggcaggtggattgcctgaggtcaggagttcaagaccagcctgactaacatggtgaaaccccatctctaccaaaaatgcaaaaaaaaaaaaagctgcatgtggtgccaggtgcctgtaatcccagctactcaggaggctgaggcaggggagtcgcttgaactcaggaggcagaggttgcagtgagctgagtttgtgctactgcactccagcctgggcgacagagcaagactccgtctcaaaaaaaaaaaaaaaaattagctgggcgaggtggagtgcacctgtagtcccagctactagagaggctgaggtgggaggatcgcttgaacccaggaggcggaggttgcagtgagctgagatcgtgccactgcactccagcctgggcaacagagcgagactccatctctaaataaataaataaataaataaataaaataaaaattgtaaaatcccaacatgtcccggcaagcgctgcgttccattcatggagctcgttcttgttcttttgcacagctgcagagccctcctttctggactgtggcatagttcattcattcacctctgtcctgtgtgtgcacattcgggttgaaaccagcgttgtgcattcacaaacagcagtttaggcgatgaccttttgcacatatactcggtctcgttagagccctgtcttcagggtgaatttctagaagaggggcctgcccttctgcagtgtggggataatggttagattaagttttgttttgttttgaaatggagtttcactcttgtctcccaggctggagtgctgtggctcgatcagctcactgcaacctctgcctcctgggttccagcgattctcctgcctcagcctttcgaatagcacccgccaccacacccggctaacttttgtatttttagtagagacagggtttcctcatgttggccaggatgttctccagctcctgacctcaaattacctgcccgtctcagcctcccaaagtgctgggattacaggtgtgaaccactgtgcccggtccagtccaggagcaagttctaaccaggatcaagggtcaaggtctgggtttgtccattatcataggctaagtcagggtcagggttcagccagggatcagggctcagttcaggattggggctcagccagggtcagggctcatcttggagtcagagctgagcctggggtcaggcatcagtctaggttggaggttgggattgggacctgggggtcttggtccaggattggaggctgtgtctgggattagggttcagtctaggatgtggaccaagcctgggatcagcattcagtccagggtagggggctgagcctgggattagggcttagtcttggatgtggactgagcctgggatgagagctcagtccagggattagggctcagtctaggatggggactgggcttgggatgcaggctcagtacagagtggggggctggtcctgggatcaaggctcagtctaggacgggggctgggcctgggactcagcaatcaggactcagtctaggatgagggactaagccttggatcagtgttcagtgcagagtggggggctgggcctaggagcagggctcagtcaagcatagggggcttagcctgggatcagggcttagtccatcatgaggcactcaacctcagaacacacaatgtctctctgtgtaggtgcctgagtcatgtgaggctggactgaggctcacttgtctactcactgggcagggcagtgcctgggcaagacctggctgtttgtttccctcctggcctcacctcccagctgccggcccctcctccccgagccccacatccctctccagatcccctttctgcttggtgacctccagtgacaaaaggcagctgcctccccagtcagttcctcgcatggagcctcccgacactgtcctgcttcagaactgaaccgtaagcaaagggaggggccatggggccccagcatgtgctgcgatcagcccccgtctcctgccagccctgccctccctggggtgcccccgcttctcagggccgatactgtgccgctcatgggacgcctgtgttctcatgggacgtctgtgccctcatgggacacctgtgcccctcatgggaggcctgtgttctcatgggacgcctgtacccctcatgggacgcctgtacccctcatgggacgtctgtgttctcatgggatgcctgtgccctcatgggatggctgtgttctcatgggacgcctgtaccctcatgggacgcctgtgcccctcatgggacgcctgtgttctcatgggatgcctgtaccctcatgggacgcctgtgcccctcatgggacacctgtgttctcatgggacacctgtgcccctcatgggatgcctgtaccctcatgggatgcctgtgccccgcatgggatgcctgcattctcatgggacacctgtgccctcatgggacacctgtgttctcatgggacacctgtgttctcatgggacacctgtgccctcatgggacgcctgtgccctcatgggacaactgtgttctcatgggacgcctgtgttctcatgggacgcctgtgccctcatgggatgcctgtgttctcatgggacgcctgtgcccctcatgggatgcctgtgccctcatgggacgcctgtgttctcatgggatgcctgtgcccctcatgggatgcctgtgttctcatgggacgcctgtgcccctcatgggatgcctgtgttctcatgggatgcctgtgcccctcatgggatgcctgtgccctcatgggacacctgtgttctcatgggacacctgtgccctcatgggacgcctgtgttctcatgggacgcctgtgccctcatgggatgcctgtgccctcatgggacgcctgtgacctcatgggatgcctgtgttctcatgggacgcctgtgttctcatgggacgcctgtgccctcatgggacgcctgtgttctcatgggacgcctgtgccctcatgggatgcctgtgccctcatgggatgcctgtgccctcatgggacgcctgtgttctcatgggacgcctgtgcccctcatgggacgcctgtgccctcatgggacgcctgtgccctcatgggacgcctgtgttctcatgggacgcctgtgcccctcatgggacgcctgtgccctcatgggacgcctgtgccctcatgggacgcctgtgttctcatgggacgcctgtgcccctcatgggacgcctgtgttctcatgggactcctgtgccctcatgggacgcctgtgttctcatgggacgcctgtgcccctcatgggacgcctgtgttctcatgggacgcctgtgccctcatgggacgcctgtgttctcatgggacgcctgtgcccctcatgggacacctgtgttctcatgggacgcctgtgccctcatgggacgcctgtgttctcatgggacgcctgtgcctctcatgggacacctgtgttctcatgggacgcctgtgccctcatgggacgcctgtgccctcatgggacacctgtgttctcatgggacgcctgcattctcatgggacgcctgtgccctcatgggacacctgtgttctcatgggacacctgtgttctcatgggatgcctgtgccctcatgggatgcctgtacccctcatgggacgcctgtgttctcatgggatgcctgtaccctcatgggacgcctgtacccctcatgggacatctgtgccctcatgggatgcctgtgcccctcatgggatgcctgtgccctcatgggacgcctgtgttctcatgggatgcctgtaccctcatgggacgcctgtgcccctcatgggatgcctgtgttctcatgggatgcccgtgccccgcatgggacgcctgaattctcatgggacacctgtgccctcatgggacacctgtgttctcatgggacgcctgtgttctcatgggacacctgtgccctcatgggacgcctgtgttctcatgggacgcctgtgccctcatgggacgcctgtgttctcatgggacgcctgtgccctcatgggacgcctgtgccctcatgggacgcctgtgttctcatgggacgcctgtgcccctcatgggacgcctgtgccctcatgggacgcctgtgttctcatgggacgcctgtgcccctcatgggacgcctgtgttctcatgggacgcctgtgccctcatgggacgcctgtgccctcatgggacgcctgtgccctcatgggacgcctgtgttctcatgggacgcctgtgccctcatgggacgcctgtgccctcatgggacgcctgtgttctcatgggacgcctgtgccctcatgggacgcctgtgccctcatgggacgcctgtgttctcatgggacgcctgtgttctcatgggacgcctgtgcccctcatgggacgcctgtgttctcatgggacgcctgtgccctcatgggacgcctgtgttctcatgggacgcctgtgcccctcatgggacgcctgtgttctcatgggacgcctgtgcccctcatgggacacctgtgccctcatgggacgcctgtgccctcatgggacgcctgtgttctcatgggacgcctgtgcccctcatgggacgcctgtgccctcatgggacgcctgtgttctcatgggacgcctgtgcccctcatgggacacctgtgttctcatgggacgcctgtgccctcatgggacgcctgtgttctcatgggacgcctgtgcccctcatgggacacctgtgttctcatgggacgcctgtgccctcatgggacgcctgtgttctcatgggacgcctgtgcccctcatgggacacctgtgttctcacgggacgcctgtgccctcatgggacgcctgtgttctcatgggacgcctgtgcccctcatgggacgcctgtgttctcatgggacgcctgtgcccctcatgggacacctgtgccctcatgggacgcctgtgccctcatgggacgcctgcgttctcatgggacgcctgcattctcatgggacgcctgtgccctcatgggacacctgtgttctcatgggacacctgtgttctcatgggatgcctgtgccctcatgggatgcctgtacccctcatgggacgcctgtgttctcatgggatgcctgtaccctcatgggacgcctgtacccctcatgggacatctgtgctctcatgggatgcctgtgcccctcatgggatgcctgtgccctcatgggacgcctgcattctcatgggacacctgtgccctcatgggatgcctgtaccctcatgggacgcctgtgcccctcatgggatgcctgtgttctcatgggatgcctgtgcccctcatgggacgcctgcattctcatgggacacctgtgccctcatgggatgcctgtacccttcatgggacgcctgtgtgtggttgccatgattactacctgagactgtcactacgacagttactattgttactacttgagaccatcattacaagactgaacgaagggacgaatgtagaaatgaaaacttaagacagaagaaactgttttaaaggaagggaccaggggaagaaaaagagagctccctgcttctagtgagcaaaggcagccccccaagcttctacagcccttcgtacttattgggtagaaagcagggggaggaaacgattggccagctgcttgattgttcacacgttcacgttattgctaacaggtttcagatttgcctacttgcaagaaacacttgtgcctggggcgtgactgccctcagcattccttctgggcggcagacgcagtttgtcagtttgccaacagcctgctttcatgagaacagtttgctgtttactcacgtagcctccagtggtatactgagttgatcacaaccctcattctttcggccttcaacacctgagccctcacgggacatctgtgcccctcatgggacacctgtgtcctcgcagtacacttgtgacccttccaggacaccttactggtagaattagtgtagctgcccccaccctgaggccaaggacaccattgtctcaggaaggctgaagaccacaggctcctggggggacagagggcaggtggggcccctcaggaccctccttggtggtaagtgggcctggcctgggggtgattgcaggcgggaggaggctcccagcagggacttatcctgggtcctactcacacttctggggcctgcattatttcccaaatcaccccacaccccaaggccttctggatggggacgagtggggggtcacagacactgggggagctggagagcagagacctcacactccatccgtgacagatgatgtccaagcccctacatgccccagaccccagggcaaggctgagcctccctcctcagaccccagggcaaggctgagcatccccactcagacctcagggtagggcctcgcctcctcccttggaccccaggacagggcctcacctctcccctcagaccccaaggcagggcctcgcctcccccctcagactcaggacagggccatgcctccccactcagaccccaaggcaaggccaaccctcacccctagaccccaggcaggttcaagcctccccgctcaaacctcagggcagggcatacctccctcctcagacccagggcagggtgtgtctcccctctcagaccacagcacagggcctcgcatccctcctcagaccccaggacaaggctgagcctctccgctcagaccccagggtaaggtcatgcctcccctctcagaacctagggcaaggccaaccctcccccctcagaccccaggcaggtccaagcttccccctcagacgccagggcagagcctgcctccctcctcagacgccagagcagggtgtgtctcccacttagacccacagccacctcacctcaggctgagtcaccgtgagccgttgtcagcagggccatggggatggggtgagcaagtccctacttttcctatgcacctcaatcccagtggggggctgccccagggggccagcagctctgctcccagcagggtgagctcaggggcaggagaggcaaccatgaatcccaaaatgggcgcctggccccgagaccctaccagcttgtccctgggggtctctctccctggacctgtgtgtcctcccatgggcagaaagttggcctcaggccgcctttgtgggcctcagttttcccttctgtaacgcatcaggctctctgggcctcagtttccccttctgcaacgcatcgggctctctgggcctcagtttccccttctgcaacgcatcgggctctctgggcctcagtttccccttctgcaacgcatcgggctctctgggcctcagtttccccttctgcaacgcctcgggctctctgggcctcagtttccccttctgcaacgcatcgggctctctgggcctcagtttccccttctgcaacgcctcgggctctctgggcctcagtttccccttctgcaacgcctcgggctctctgggcctcagtttccccttctgcaacgcatcgggctctctgggcctcagtttccccttctgcaacgcatcgggctctctgggcctcagtttccccttctgcaacgcatcgggctctctgggcctcagtttccccttctgcaacgcctcgggctctctgggcctcagtttccccttctgcaacgcctcgggctctctgggcctcagtttccccttctgcaacgcatcgggctctctgggcctcagtttccccttctgcaacgcatcgggctctctgggcctcagtttccccttctgcaacgcaccgggctctctgggcctcagtttcctcttctgtaacgcatcaggccctgtttcggggatcaagtcggatgagtcagtgctcaagggcatgcaggcacttgacatttattaggcacctgctgtgtgctgagcgccggtggagcatgtggggagacctcagtggagccgacgggtgcttcgggggtgatcagggctggtggggaggagtcgtccggctggaaaggggtggcccatcccgagtggggactcatttcccctccgtgactgacggctccggggctccctgcgggtctccggctttcgaggacaggaagaaggcagccagggcaggggtgggggtcctcacagccagggcagccccagcgcgttggctccaggagcccgggtgggggccgaccgttggggtgcccctccctgtcctcggccttacctccaccctggagggcaccttgaacataacaggaaatttcaaataacaggaaaccaagaccagcaaggcgggtggctccaccctgcgtcgggcctcagtcagcccccgggggaggccatgaacgccacggggaccccggtggcccccgagtcctgccaacagctggcggccggcgggcacagccggctcattgttctgcactacaaccactcgggccggctggccgggcgcggggggccggaggatggcggcctgggggccctgcgggggctgtcggtggccgccagctgcctggtggtgctggagaacttgctggtgctggcggccatcaccagccacatgcggtcgcgacgctgggtctactattgcctggtgaacatcacgctgagtgacctgctcacgggcgcggcctacctggccaacgtgctgctgtcgggggcccgcaccttccgtctggcgcccgcccagtggttcctacgggagggcctgctcttcaccgccctggccgcctccaccttcagcctgctcttcactgcaggggagcgctttgccaccatggtgcggccggtggccgagagcggggccaccaagaccagccgcgtctacggcttcatcggcctctgctggctgctggccgcgctgctggggatgctgcctttgctgggctggaactgcctgtgcgcctttgaccgctgctccagccttctgcccctctactccaagcgctacatcctcttctgcctggtgatcttcgccggcgtcctggccaccatcatgggcctctatggggccatcttccgcctggtgcaggccagcgggcagaaggccccacgcccagcggcccgccgcaaggcccgccgcctgctgaagacggtgctgatgatcctgctggccttcctggtgtgctggggcccactcttcgggctgctgctggccgacgtctttggctccaacctctgggcccaggagtacctgcggggcatggactggatcctggccctggccgtcctcaactcggcggtcaaccccatcatctactccttccgcagcagggaggtgtgcagagccgtgctcagcttcctctgctgcgggtgtctccggctgggcatgcgagggcccggggactgcctggcccgggccgtcgaggctcactccggagcttccaccaccgacagctctctgaggccaagggacagctttcgcggctcccgctcgctcagctttcggatgcgggagcccctgtccagcatctccagcgtgcggagcatctgaagttgcagtcttgcgtgtggatggtgcagccaccgggtgcgtgccaggcaggccctcctggggtacaggaagctgtgtgcacgcagcctcgcctgtatggggagcagggaacgggacaggcccccatggtcttcccggtggcctctcggggcttctgacgccaaatgggcttcccatggtcaccctggacaaggaggcaaccaccccacctccccgtaggagcagagagcaccctggtgtgggggcgagtgggttccccacaaccccgcttctgtgtgattctggggaagtcccggcccctctctgggcctcagtagggctcccaggctgcaaggggtggactgtgggatgcatgccctggcaacattgaagttcgatcatggtacgtgatgttgcggcctcttattccctggtgcgtgcatgcgtgggggccgtggctcaggggggctgtggatctaggggcagccgggtgtgtctttgctagagagggccacgggccagtgccctgtgagggtggagtgtgtgtgtgtgtgtgtgtgtgtgtgtgtgtgtgtggacaacctctgggcgttgcgggaagtgggggtgacaatgacagttaatgccgcctcttcttgttcacttcccctttagaaatggcagggcccatgccccatctctggcctctgcatcttttggggacccactctctggggctggcagaggcaccaccttggcttcctgggctgggggaatcttccctcacatccccttcagcatgaacggcctcggctttcccggtgggtaaaacagtttaatcactgaagccgaagcacagggttgattgtacacgctccccgccagccacaggggctgacaactgcctgccccgtgaaactccagtggagacgtttcagctccacaccattcagtatgggagacgccagccccacggggctacggtgcaagcagataactgaatttcgaagtgtaggttgtgtttaatttgaatctgtttatatttcggtagccccatggggcgggtggccacagtttcagtgcagatgtaaatccggaagcctccagcacctgcagctcatagacagctctcgcccaccttctcccaggaccaagccagtcccgtccagtccagtgtctgagcagagtcagaatccacaccacccgccgcctgggctcagaaagttctgctttaagtcattatttctccactgtacgatggggaatgcggtgtgtgggggccatttacccaccaacacagcagctgtgaggcacacacggctattgaaaattcatggaaattgctgggtgtggtggctcatgcctgtaatcccagcactttgggaggccgaggcaggaggattgcttgagtgcaggagttccagaccagcctgggcaacatagcgaaaccacatctctacaaaaaaatcctccaaaattaaaaaaattagcccgagcatgttgttgcatgcctgtggttccagctactcgagaggctgaggtgggaggatcacttgagcccgggaggtcgaggctgcagggagcggtgatcgtgccagcctgggtgacagagtgagaccctgtctctaaaaaaaaattaaaaaaaaaaaaaaaagaaaattcattgaaattaaatgaaagttaggccaggtgcattggttcatgcctgtaatcgcagcactttggggggccgaggtgggtggatcatgaggtcaggagttcaagaccagcctggctaagatggtgaaaccctgtctctactaaaaatacaaaaaataagctgggtgcggtggcaggcgcctgtaatcccagctactcgggaggctgaggcaggagaatcgcttgaactcggagggtggaggttgcagtgagctgggattgctccactgcactccagtctgggcgatagagtgagactccgtctcaaaaaacaaaacaaaaacaacaacaaaaaagaaattaaatgaaagttaaaaatttagtctctcagtgtattgatttgctagggcagccatgacagtctcacagatggagaggcttgaaaacagacatttatgctgccataattctggaagccagaagtctgagatgaaggtgtgagtagggctgggtcctcctgaggctgacggggatctgcccaggcctctcccagttcctgctggtggccggcgtccttgatgttccttggcttggagaagcgtcagccgcatctctgcctccatctccacaaggcgccctccctgggtctgtatccaaactcccccaactccttcaaccttttttattttaagagatgaggggccgggcgccgtggctcacgcctgtaatcccagcactttgggaggccgaggtgggcggatcacgaggtcaggagatagagaccatcctggctaacacggtgaagccccatctttactaaaaatacaaagaattagccaggcgtggtggcgggtgcctgtagtcccagctactctggaggctgagtcaggagaatggcgtgaacccgggaggcagaacttgcagtgagcggagatcaggccactgcactccaccctgggtgacagagagagactccgtctcaaaaaaaaaaaaaaaaaaaaaaaaaaaagagatgagggtctcattaagttgcccaggctggtctcaaactcctgggctcaagtgatcctcccacctcagccttctgaatagctgagactacaggagtgcaccaccaagcctggctcattttcctatttttacatttattattattattgttattattatttttttgagaaggactctcgctctgtcgtccaggctggagcgcagtggcgcgatctcagctcaccacaacctccacctcctgggttcaagcgattctcctgcctcagcctcccgactgggactacaggcacgcaccatcatatctggctagtttttgtatttttagtagagacgggattttgccatgttggccaggctggtctcgaactcctgactcaggtgatccatctgcctcccaaagtgctgggattacaggcgtgagccaccgtgcccggccgatttccccatttttataaggccaccagtcacatgggattaagggcccaccctgctccagtatgacctcatcttaactaatgccatctgccacaaccattttccaaataacatcctatgctgaggtcctgggggttaggatgtgatcatgtagattttgatgggacagttctttattttcttttatattttagagacagggtcttgctctgtcacccaggctggagtgcagtggtgtgatcatagctcactgcagcctcgatctcttgggctcaagtgatccttctgccttgggtttccgagtagctgcaattacaggtgcacaccaccacacctggctaatttttatattttttgtagagacggggctgggtgctgtggctcacccctgtaattccagcactttgggaggccgaggcaggtggatcaccttaggtcaggagtttgagaccagcctggccaacatggagaaaccccgtctctactaaaaatacaaaattagccaggcgtagtggtgcatgcctgtaatcccagctacttgggaggctgaggcaggagaattgcttgaacccgggaggccgaggttgcagtggactgagttcgtgccactgcactccaatctgggtgacagagcaagactccgtctcaaaaaaaaaaaaaaaaaaaaaagagagagagagagagagacagggtcttgctatgtttcccaggctggtctcaatctcctgggctcaagtgatcctcctgcctcagcctcccaaagtgttgggactacaggcatgagctactgtggctggccaattgcagacagatggaactgtggccagccacttcaccagtgaagtcccaaacacccctctgcaggcatgataagctagggtagttcttatcttttcctgattcctgttctctgtgtgtttagtggggaccacagcaggcagggtggggtgttggtggaatttgggataagtggagtctgggcaggcctggagctctctgtctgccttctgggcccgtgttggctgaccctgttgccccctctgccctgctttggctgagctgaattatttcttggtccttcccttctgggggcttctcgcttaacctcctttgttgtccctgataaaggggccttgttagcccgcaccttccctccttcgtcacttgacttctgcctgctcattctttgtaccttagttttagcgtcacctcctccaggaagtcttctttgatttctcctcctccctaggtctcctctaggctcccacagctgcctgtgttccctgcatgacagctctgctttatactgggcacaactttccctctttcttcactcatctgctctggctcatcttttgagtttcagcttaagtgtcacctcctccaggaagcctcctctgatttcctctcctccctaggcctcctctgggcttctcccagctgcctttgtgtcctctatcccagctcccatcacccctggtcacacaatccacctcctcctttggacttcgagctccgtgtcggtggatagtgtggctttgctggggtcccggctgtgtccccagcacccaccacacggctggcacacagtaggtgctcagtgacccagcagcacactcagaaactccctttctagccgggcgcggtagctcacgcctgtaatttacagctactcaggaggctgagacacaggaattgcttgaacccaggaggtggaggttgcggtgagctgagatcaagccactgcactccagcctaggtgacagagactacatctcaaaaacaaacaaacaaacaaacaaacaaacagaattctcacatgctgctggcagggagagtgcttgattctttatcattatatctgaggaaactgagactctgagaggtgaagcgacttgcccaaagccacacagctgggaaatggaggagttgggatttgagcccaggctcttaatcggcaccaatgccacttctcacttgggacagaaaggaagccctgactccttaggcagctgtacggagcctgggatgataacgtgctgagagccagggctactgtctgctgcaccctggggctcagtctccccatctgtacaaagggacgttccttaggtacctccagccctgagacactgggttttaactttaaatttctgatgaacaacaaatacttttttagtataagtatgccccaaatatgaataaagataaatataaatacctgccaccgacccctgcacaaaccgcaggttccagactacaagtcccacaacccactgcggcctcccttaggaactgactatcatgactttctatttttcattcattcattcaaaaatggtataggccacccgccgtgcgccaggtcttgtgctagatgccggggatacatcatatgcacaaaacagacaaaagtttttgccttcgtggagtttgacatctacatcctcgggagttttaagtgatttttgtttttctcagcaatttctgccaggacgactacagttcccgtgaccctttgtgtgtttgacgggactacaactcccagaagacctagcgcgccaggcaggcacttccttttctctttatccccaacttccttccaggtcgcaaggtcacgtcctgtccccacctttcgcccctcaccctagctcccccaacgccaaagacaaggttaagaaagtgatatcgcgaaatagttttttaaagcattttattgcattttatgacttggagtttatgtgaaacctcaacggtattagccgaacagcctgccgcaccttccgggagttccagagtgggcctacaactcccacagggctccgcgagcgccggacggacggactacaattcccgacaggcagcgcggctggcggggcggttcgccgcggtgcccacaggacctcagggcgagtgcgggctgccccgcgcggcgcccgcaggaccccggcggctacccatgccgaggtgagtccgcgggagccgccgccgccgccgtcccgtcccagctgccgccccgcgcggccccgccgccggccaggatgctggaggaagcgggcgaggtgctggagaacatgctgaaggcgtcttgtctgccgctcggcttcatcgtcttcctgcccgctgtgctgctgctggtggcgccgccgctgcctgccgccgacgccgcgcacgagttcaccgtgtaccgcatgcagcagtacgacctgcagggccagccctacggtgcgtgtccccggcccaccctcggggctccccgggctccccggccacgccactccggcccggcgatccccaggccgatccctagctccggcctgggctgcccgacccatgctcaggccccaggcgaggcagagccctgccgccctggacccccgggcgccctggaatccctgctctccttgcctagcgcccagggaccccccgcgctcgctcccacagcccccggcccctgcctaggtctccctgccccggaacccatggccgggccaagcgtcccgcgtccctggagccctaagtcccctctctcctgtccccagctgggccggcgtctgcctgccttgccgagtttctccctcctgggccccctccgccccttaggcttcctggtccgggctcacttgagcagacgctcccgtcctgacctccagctcccagggtcctgttctggagaccatctggttggtctctggattcactgggtcacgtccgtgttcccaggcctctcgcctttagctgactgcgtttggagttaaaggtccctgcactgatttctgccaggctgagccacccgacgcggtggtccagcattccccaccccctcccacggccctgggtgccaagtgcattttgtccagtgcccaaattcaactcccctgaattttctcgctctagtcaccggcccccacgtcaagggcacatttgtccccagacccctgacgctctctggtcccagttcgtgagtcatgtttcagaatctgctagcccagcttccctggtctcctcccacgtccccagttcagtccactcgcctggggttccctttgaccccctttctgtcccgcctttgatgcatacccacgccctcagctcagcctcctcacacccacttcccagaaccccacttgttccatctttccaggatttcctcttccctttccaaattcgcacccccttgcccttgcattctgcaagtctcccactcaacagcctcgccccctcccgtcgtggccctgaccccagtgtctagaccattccacatccccttgtctttgcctggctatagctgtccctgacattccagaacctggtccctggtttttcttcttttcagcctggcccctcaggtccctggaagtcaaggcctggccttccctgtgaaggagtcccgtccgcttgttctcctggcccccttagttcccagcccggattctcttggattggtccctctcgtcacatctcaggctcaacctgaggcgcggggacccccagcttctgccagcccttggggagcccatctctggagatggaaccagactttggcctcaggtcccattttgccccagagttacgatttttttacttagagccattgttgtcaaccgaggggacgctgggtgatgtctggggacatctgtggttgtcacgaccacgggtgctcctggcatggagtgggtggaggccagggacgctgctcaattccctgtagtgcccaggacggccccaccccagagaacgatccggccctaatgtccacagtgtccaggggaagcgccctggggccacagtggtggtgtataaacccaaggcccaggctctggagggtgggagtggaaggccagaggctcctcatgcagtgaccgcgttttccgtgctgcttgggattttcccgggggaagggtcctgacgggcaccatcctgtagaatcgcctccatctttgctgcctggcacaggagccagcagccacaggaggctgccgagcccccaaagcgtggcctgtgcaaccggggggcaggattttcagcgctgcttgagggtaataaacgcaagtagccacgcgtgcctgcggctctcatagcggcttccgtggggtttccagggcagtctgcaccccaaagaccccactcctagagctcgagataccctgttcacactcttggcatctcctgcctggtcctccagctcacccggcctccctccagccccccgggcaggtgtgatctggtggctgctacactgtccctgggcaggtgtgggccccctttctctccccaagaacccacccagggaatgcatgttggcggctccctacactgtccctgggcagatgtgggccccctttctctccccgcaagtccgcccagggaatgcatgttgtctatcgagtgagcagatgtctccccgttccacggccagacggacgccctctccagcctcctagagtccctcccagtttccttgtgtggcctcttgttcttcgcagcctcctgacgttcaccccgttttccttccccgattccctcggcccctttttggtggcgcctccctccctttcccctgcagtcctttctctctttcctcgcttctctggggcctttgcccacaatcctgggttttcttctgagtcttcttttcactggcctcctcccctgtaccctcctccctggaccccagcttttctttctcctagtgaggaagctggacgcagctttccctgtatgtggcattcgcccagctggtccgtgggctcccggggtgagcggaggagcccatggggcagccgccctgcctcagcctccatgctcctcatctgcgccctgggaagcacagtccagctctcgcagggtaggcgaggcccagccagcacacccctctgtgtcactctggccgcccctgagagactgggggtggtttgggccagagccctgccgaggacaggcccttgagaagccccagcgtgctgcctttgaggccaccctccaccaccatcttcccggtgtgctttcacccccgggcccactacccggaggagctgcaacccttactcgctggggagtcctttcccaacttccttcctgctgctgttgagaggcacagggcggggcggtgccctttgtgtttgggtgtgatctgggtctcactggccaggtgcacagcacccctctcctgggagtggactctggccctgccgggtgaaggctttctcggctcggtggccgttcacagcaggtggggctcgttgagcttatggcccatgtgaggtgggaaccttagcaccccttggagcgcccagctcccaggacccgtcaagtccatcagacttgccaaaactccttcatctgggatacagctaactgcagcctgtaggtcacgtctggctctctgcctgttgttgttaataaagttttatcggcacgcggtcatgcccatccattggcatcttgtcgctggctgcttccacgcagaaacagctgagcccagtgattgtgccagagccctatggcccgagaggggaaaggttggccgtctggcccccgatagatagacaggtgcccaggccactgttcaggtccagtcctgtcacgccaactggtgacttctctcaggatgcccggtgccctccatggcgtccaccacaagtggtctcagcccattcagacgcgggtctgagggagttggtgctggtttcgcctccgcagagggccgtgtccacactagcttgtggccacccggcccgaccctggccctcgagggaggctggggccacccaaggccatctgttctcctggggagatgggccttggccacagagagcccttgccattgggccccgagcgagcgggggctgggatccagagggcagtgtggccttggctggtgctgacgcgaggcggggctccgatgggcggggcttcggaatgggaggccgtggccttcagggagctctgggtgctggtgtccccctccgttcctctgacttgctgctgctccttcccttctccctcctcgctcactccctatcccgcctgcgggagctcgaggcccggagaacgggggtgcctgccagttggcctcatctcccggccccaaaggggtgacattcgagtcacccctgggaggccagggcatgtggggacaggtggggtgcaggggaggggtgctcccagcactgcaggagccccaaggactccctcgaggtctttgctgccatgtccctgaggggcctcccaagggcagaggaaaggctcccagcaggcctggtgatgtcaggctctgagaggggagcaggggtgaggctgctgggcctggggtgcgtgggcccctgtggctcctccatcccaggcctcagagctggttctctgtgcccacctccttgtgctgcacccgagaccccgcccattcccacctgagacctgtgtcccgcctgtccccccatgcacccagctcagcccatcagacaccccgttggagcaggctgcttccctcccaccgcttcccagacagcacattgctggacacagagctggggactcatgcacgcccctggccccaagcccgaggctcagcgcaggccccgggaagagctgcgtctgtggggagatgagagaatgagggtccccagcatccagcatccaccttcagagcgaggctggctcccacggggacgctggagtcggtcctgggcatcgtgattttgagtgcttcctgcacgggtctcacacgggaggctccggggcccgcccccggcccccctgcgtcaggcctgtacccggcccccctgcgtcaggtctgcttgcgggctttgcgtggcattctgttggcttgtgcagcgctgagatgttttagagcgttgcttgtcttttaacatttgggtgatgtgacgtaagaattgggatttccggcttctggggtggtccactgaggtccgtgtccccagctgaacgtgggtggcccttttagaggggccggtgctctccagggtctttccagggcaactcaggtggccatcgcggtgtgtggcgggcagcagggagatcgtcgtggtgcgtggcgggcagcagggagatcgtcgcggtgtgtggcgggcagcagggagatcgtcgcggtgcgtggcgggcagcagggagatcgtcgcggtgctgagacttgcaggggtgaagtggcagcaagtggggggtccgtgtgcagctcaggtgtgcggagcagggacccctgagctgcgtcttgttgggtggaggacgttttgctgagagaggagggaagagcagtcccaggaagcaaaaggcagcggcgaaaccagaagccctggcgagtttccagagcggtgaccgtggggagcgccaccgcagaagtgaataagcccgtgatggagcgacagccccaggctctcagcgacggccgtggccttccagggaagaccccgcctcgccccagagacaccatagcccaagctgctgagccttctgccaccccagcccctggatttctagaaagcttacgtgtccaaggcgcagtagggtggtcctagagcaggcgagcccgaggggcgctccatgctggtcttgtggctcaacacaggggtttaacctggggcccatcaacaggcttcagggaagggccgtccccatctgggaccccctgtaacaggagttgaatccagcctgcccttggcctatttaagagttttgttggcacacagtcccacttgttggcttacctgttgtatatggctgcactcaccctgcctgcagttttacagctgagtggttgagacacagaccggaaatactcactctctggcctgttgtagaagaggtttgccgagccctggtctaggatcctgtgtagacttcggtgtggggtgggaagtgtgggtttctcccaggagaaggggctctgctgtcattagaaaggggccgggcacggtggctcacgcctgaaatccctgaactttgggaggccaaggtgcgagtatcacctggggtcgggagtttgagaccagcctggccaacaggcaaaaccccgtctctactaaaaatacaaaaattagccgggcatggtggtgggtgccggtaatcccagctactcgggaggctgcggcaggagaatagattgaacccgggaggtggaggctgcagtgagccgagattgtgctgctgcactccggcctgggcaacagagtgagaccctgtctcaaaaacaaaaccaaaaaacaaagattctcaggaggtctgagacccagggttcgcgtggcactgagcctgtgggcatggacccggcacgcgttcatggcccctgtgacccgttatgtcgggggcaggctggggggaccctgggagcttctcgaatcggtggtcttccaggttgtgggctggggctggggctggggctgctgagtgggtccctggcctggatctgtcccctcccgtcggcctggccacccgccgaggctcacgaccccgcccctgtgcccacaggcacacggaatgcagtgctgaacacggaggcgcgcacgatggcggcggaggtgctgagccgccgctgcgtgctcatgcggctactggacttctcctacgagcagtaccagaaggccctgcggcagtcggcgggcgccgtggtcatcatcctgcccagggccatggccgccgtgccccaggacgtcgtccgggtgagcgtctgccctgccccgcccggctcaggtccagagctgcggcgggagttggaggcaactgtgtgaccctaggcgggtcacttcgcctctctgagccctttggaaagtaggatggactgttcccctgctccattgatctccaaggggtgattctgtcttcagaggacgctgggtgatgaccggaggtgttcagggagggccgctccgggcgtggagtggatggaggccagggatactgctcagcaccctgcagtgcccaggacggccccgccccagacagtgatctggccccagggtccacagggctgcgcaggagaacctgcctagagtgaacaagacctggtagaatccagcagacgccctgggtgaagatacttttgcagatgagaaggggtgggtgggttgggggaagccctggttttctgtgagtgcctcatggttcatgccgccctctgagggcctgcctgccctccagggacagtcactgggccccctgctaccccctccagggacagtcactgggccccctgctacccccaccagggacagtcactgggccccctgctaccttgccacccccaccaggccagcagccccctaagtgtgtgtctgctccacagcaattcatggagatcgagccggagatgctggccatggagaccgccgtccccgtgtactttgccgtggaggacgaggccctgctgtctatctacaagcagacccaggctgcctccgcctcccagggctccgcctctgctgctgaaggtgtgctctgggctgcagggacggggcccgtgggcgtgggtgtggggaggcgtccccatcccaagggctgcggtcaccctgggctgtttctgctctcagcgtgtggcatcccttcgccggggttaacagtgggggttcctgggccccgtgtggacctgctacatcaccacctccgggctgggacctgggactctgcatttttgcagccgcctgtcccccctcccagctgctggctctgtgcacacgaaagaccagaaccacggactcaggaggagcctttccgatcctcaggggctcggggtttatgaaacacacgggcatctgttcagttctctacctgccaaggacattctcagcatcacatctcgagtgggcggcgtgggtgcgtcggcggtgtccttacggagaaggggcacacgcctttcctccagccccgtgaacgggggccctggcagcgaactcagagcaggaacccggagctctgtggtgggacctgtggtggggaaagatgggagttgccgctgtggagagtgaggagaaagaggaactggagaagccagctgaggggcttgcccggggctgtcatcagctactgggggagcagggctgagaagggaggccagagcccagggccgcagagaacaggcaggtgtgtcctggcccagccccaacaaaaacagtttggtgctgtggtttcaagctatagtaaaggaggctgaggcgggtgggtcccctgaggtcaggagttcgagaccagcctggccaacctggcgaaagcctgtctttactaaaaaaatagaaaaagttagccgggcgcggtggcaggtgcctgtaattccagcaacttgggaggctgaggcaggagaatcacttgaacccggaaggcggaggttgtggtgagctgaggtcacaccattgcactccagcctgggcaacaagagcaaatgtccatctcaaaaaaaaaaagtttcatcctacacagccagatcagtggaattccagatgcagagttggctaacactggccaggggccacctgtttttgttgataaagttttattggcactgggccacattcatttatgcacagtccacggtggctttcccagcagcagaactgaattgccgtggctgcggcagagaccatccagcctgcaaagccgaaagtgttatctgatcctttgcagaaaacgttcccaacccctggtttagattaaaagtcttgacagtggccatttttgttgtggtaatagaagagtatagttctgcagatacctaagtatcctgttagagaagaaggaaagaggagtcgtcttctttttttttttttttttcttttatgagacagagtctcactctgttgcccaggctggagtgcagtggcacaatcttagctcactgcaacctgaaggaggaatcttctacttggtggagtattatgcagctggtaaaaatgatgttgagggccaggcaaggtggctcacgcctgttgtcccagcacttacggaggctgaggcaggaggatcgattgagggcctggagtccaagattagcctgggcaatatagcaagacccttgtctctacagaaaatttaaaaaagccaggtgtggtggtgcatgcctgtagtcccagctgctcaggaggctgaggtgggaagatcacttgaacccttgaacctgggaggcagaggttgcagtgagctgagatcttgccattgcactccagcccgggtgacagtacgatactccgacttgaaaaaaaaaaaaattacagagagttcccaggagcatgcttcccccagtgatcatatctttttgttttgttttgttttgtttttttgagacggagtctcgttctgtcacccagactggagtgcagtggcacaatctcggctcactgcaagctccacctcccgggttcgcgccattctcctgcctcagcctccagagtagctgggactacaggtgcccaccaccacgcccagctaattttttgtatttttagtagagacggggtttcaccgtgttagccaggagggtctcgatctcctgacgtcgtgattcgcccgcctcggcctcccaaagtgctggtattccaggtgtgagccaccgcgcccggccgatcatatcttacatacctatgatgattgtgttttcatttttattttattctttcttattatcttttattttatttcaaaagattgtatttttaggccaggcacagtggctcattgcctgtaatcttagcactttgggagggtgagacaggaggatcgcttgatcctgggaggtagaggctgcagtgagccatgtttgcgtcactgtactccagcctgggtgacagcatgagaccctgtctcaaattaaaaaaaaagttgtgtttttaaaatgctttaaagcacagaagtgcggactcaaagttgtgtgaactcacaggcattttcgggcaggtcctggccctaagtccctaagtgaacagctgttattgagggcccgggaggaaaggatcagaatggcatggaggagaaattccccagcagaacgttccagaaaggagatgtgaataatttcgagagaaggttgtcctagggggagcacgggcatcctgtggtatcgaaatctgctggtcacgtccccacacccggctggttggctctgcccgagcccccaacctggggtgtcagtgctggggatgccccctggctggggccctggctgggccaaggctgatgcgccctctccctctccctagtactgctgcgcacggccactgccaacggcttccagatggtcaccagcggggtacagagcaaggccgtgagtgactggctgattgccagcgtggaggtgagtgccgcctgccccggagccagccccacgtccccaggggttcctgccatccgcctggctccccggctcggccgtactagaggggagccgctgatgggaaactggagtcggatcgcccccctgcctggctgaaaacctcctgtggctccgctggcagctgcaggaacccaaactcctcacatggccggggagtcgctctgtggagtgcccaggcccctgccagcccccggcccatctccttccttccatcatggacccccacacaccaagccgctgcctcccaccccagggcctttgcaccggctgcccctcccaggaagccccctccaggctgcagtgtcgccagccccctctcatcacataacctcacccgtcagcccagacgctgcgtcctcacagacccttccgagcaccccgggatatcagcagagtcaagagagggtggggagctgccggtgcggaagtagcctctcggatcatcagggcagatccagagggtgaagcctgtgtcgctgctgctgcagcactggcaggggccttaaaacccgaggaagcacccaccgactcctctagcatttccctgcgggacggcgccggtgaggggtgcagatgagtccacacagatgaggggttgcctcactgtcgggggagccctgaacaagacgtgcttgctgttttggggacccaggccttgttggggggtgcccgagtggaaaagcagcggcttaggccggggtggggaaagtgtcctggaggccccggctccccatagacaggccttggcggaggagccctggggtttgtcgatggcggctgttctgtttgttcctgttggattgtactgtgggcccgggaggcgcgtcctattcccagcgccagttagtgtgcagtgagacccggtagcctggcctgcgtcactccacagtggcacaggcgctgggctccgcatcccatggggccatgtcgattccctttcccctggctgtgccctttctcctgtgagcagagccctcttggcagctgggctttgagttcagccgttgaaggatctccaagtggaaaagcatgttgcaaaaacagcaagtagactcccacagccagacggggagtccccaggccacagccggccctctacctgcttttgtaaataaagtttttgcttgtttgtttttgttttttgagacagagtctctctctgtcacccaggctggagtgcagtggcgcgatctctgctaactgcaacctccgcctcccaggttcaggcgattgtcttgcctcggcctcccgagtagctgggattactgtcatgtgccaccacgcccagctaatcttttgtaattcttttttttttttttttgagatggagtttcgctcctgttgcctaggctggagtgcaatggtgcgatctcagctcactgcaacctccgcctcctaggttcaagcgattctcctgcctcagcctcctaagtagctgggattacaggtgcccgccaccacggccagctaatttttgtatttttggtagagacggggtttcaccatgctggccaggctggtctggaactcctgacctcaggtgatctacccgccttggcctcccaaagtgctgggattacaggcgtgagccaccgtgccgggctgtgtaaataaagttttatggcacacagccatgctgatgcatgtgcaagccgtccatggcagtttcttagttgtaacagacaccatctggtccccaaggctgaaaatatcccctctggccctttatgaaagtctgctggcccccgggctagagcagaatccgactttggtggggtaagaggcagggaggggtgcacacagaccctgaaggaacccgaatgcctggctgaggggctcagccccgttcccacaaacagttatcctcctgaggggctcagccccgttcctataaaaacttaacctcctggccgggcgcggtggctcacacctgtaatcccagcactttgggaggccgaggtgggcggatcatgagatcaggagatcaagaccatcctggctaacatgatgaaaccccgtctctactaaaaagtacaaaaaattagccggatgtggtggcgggtgcctgtagtcccaactactctggaggccgaggcaggagaatggcgtgaacccgggaggtggagcttgcagtgagccgagatcgtaccactgcactccagcctgggcgacagagtgagattccgtctcaaaaaaaaaaaaaaaaacacaaacaaaaaaaaaaaacttattctcctgctctccccgatttttaaagatttcgacctgagggccagagcaggagtgggtccctgttcccggctctacctcctccctggaggagctccctggggctcccagagtcagaggctggcacctcctgtggtcctcagtgctgaggccgatgctggcacccagcggacgggccccacgtggcccagaggggaggggtctccaagccccacacacgggtcacctgccccaggaacagccaggccattcccctgctctctatccacaggggcggctgacggggctgggcggagaggaccttcccaccatcgtcatcgtggcccactacgacgcctttggagtggcccccgtacgtatgtgtgtccccattccccccaccccacagggcttggattctggctccagtccagtgccgaggcaaagcgcctgtaggggatggcggccagggtcagcggctctccctgtgacggcctttgcccgtcatcctggtccccgcgagggcctcagggtgggtgtcgtggggctgaaacaggcccggctcttgccccggggtcgcaggttccagggcacggcggtgtctgtgtcagaggctgagcccagggagtctgagtcagggttccccgggccagcgctgggtgccgtggctccacacgaggcctcctcgaggctgtggtttgtcccagcgagcggtcatggagcacgtagcagagtccgcgaagggaaaggcgcgtgcggtgagttggggaggccagtcctggcttccaggccctctccctgtgtgtcacgtggaacacgcctcattgtcagcagtgagctgggacgacagcccaaagcactgtcaccagcgagacttccagagacccagcgcccggttcctatgggagctggttctacagcccctgctgcctggcccatgccgggattccagactccggagggaagcagggcccgtgtgtaaaccatggtgtttgcaggaacagctttggacccagagcctgtcctgtcagcgagggtcgggggccctgctgcaggttcctggtctcaggcctgcggcacaagcttggttctgctcagcgtgggttgagcgggagtggggtgggggggcatgtaccacggtgtcaaccagcaccctgcctcctcctttttttttttttttttttttttttttaattgagacagtcttgctctgtcccccaggctggagtgcagtggcacaatctcggctcactgcaacctctgcctcctgggtttaagcgattctcctgcctcagtctcccgagtagctgggaccacaggcacccgccaccacacctggctaattttttttatttttagtagagacggggtttcaccacgttagccaggatggtctcgatctcctgacctcatgatttgccctcctcagcctcccaaagtgctcggattacaggcctgagccaccgcacccagtcctgcctcctttgaacacaaatcagctgaaccaggcagagtgcggagggtctgggcagatctgctgcctggctgagtgcccgaccccttggagggccaggcccccagccttgagaatgcctggtcccgctgggcccacacaaactcaagctgctcagagcaatgcctcttgaactcctgacctcaggcaatccacccgcctcggcctcctaacctgctgggattacaggcatgagccaccgcgcccactgcctttctctgtcctcattgtcccctatgaagctttttttgttttaaatttattttatttatgtatttttttttttttttttgagacggagtctcgctctgtcaccaggctggagtgtagtggcgagatctgggctcactgcaaccttcgcctcccgggttcaagcgattttcctgcctcaacctccggagtagctgggactacaggcgcgtgccaccacacctggctcattttttgtatttttagtagagatagggtttcaccatgttggccaggatggtcttgaactccagaccttgtaatctgcccatcttggcctcccaaagtgctgggattacaggcgtgagccaccgagcccaggcaaatttattttttgagataatgatagaacataaagttcaccattttagagcgtacgagtgggttttagtacatccaaagttgtacggtctccacctctaattccagaacattccatcaccccaaaaagcagcccctccccatcagcagtcactcctggtcccctccccagccccagaaccccagcatgtgcgcatccgtcccagtgcctgtggactggcctgttggacgggtcctatgaacagatcctacactgtggacaaagtcttttggatctggcttctctcactgaggagggtgtttattgtccccctgaattcagtgccaccgaggtcccctttatatgctgtggccttgggacggtcccaagccattgcaatgtccaagaaacagtgtggccttattgagaatgctgctttagatcacaaaggtgcatccaagggcgggaagggcatgtggtcgggctgtgcaggtctctccacagccggggctcgagggtggaagggtgggtcccacagaggggaccccgcacagagaccagggctggacagatgctgccctctgtgagcgaatctggcctggccctgggctccaaattctgcatgtagcttctcccgggcgcgggccgagccgaggtggatgaggagagtcctgggcttggcggggccccgcagaccccaggccatcagtcggggattgaatacaggaggggagcgaccacagctgcccactggacgtggcagaggggctgggggacagcacagagatgaccgtggctgctgtgggcagaggtcatggggctacgggagtagggtgggggtgacggagagatgactgtggctgctgtgggcggaggtcatggggtgcgggagccgggcgggggtgactgtggccttgcctctcccgtccctgtagtggctgtcgctgggcgcggactccaacgggagcggcgtctctgtgctgctggagctggcacgcctcttctcccggctctacacctacaagcgcacgcacgccgcgtgagtgccggggtgggcagggggatgggggtgcgggggccacactgccggacagcgctgcccaccaggcacctctgcagatgtttctctggagcctcctggccccaaagtgggcctgagcccaggaattggggcgccttatttatcgagggctaagctgagccctcgcaggctctgtctcttggagtcccacagggcccagctgctgctcaccccaggaacctgctgggaatgctgtcagctgcaagtgttagagacgcccggttaagggccctggaactaggggatcccctcagccctgtgtggtcggggccggatttttcgctgggggtgggggccgtcctgggcactgcagggcgctgagcagcatccctgccccactcactccatgccaggaacacgccatagtcatgatagccacaggtgccctccgacatcacccactgtccgctgggggcagaagcacccctggttgagacccccctgggttagggaattccacgggcccccgagagactatgtcccgtgatcatctgccccgctgaggtcccaggaggctgcacacattgaaatccacaccctgagtaggaagggagagaggaggtgaatcccaggagctggggtccccctggtttatcccgtctaccccgttgggagtttatcctggtgtctggtgtgagcagggggcagacttgatttttccccagataatgaatgcaggcttcgtccccgtggccctgtggatgtcttctgtgcatgactctctcctgggtgccacccactccatcccaggagcacccccagacgtagcaaccacagatgtctccagacatgactgtgtctcctgtgcggggtggggtagaatcacctccgggtgagaccccggcccagtcacctgctcccgagatggtactgctgcagtcattgtgtcagcagctcagagaggccagggccactgtggctgagacgtttctcagccttctcacagtcacaaggcgccgggagtcatgtcctggttcaggcaggaacttggactcgaactcctggcctcaagcgatcctcctgcctcagcctcctaaagcactaggattacaggtgtgagccaccatgtccagccaaaacttgtttttttttttttaagctgcagaacctcttcccccagccccccactgatgccttttgagaagctcatgctgtcaaaaacgtgtgaacggggctggtttctgccaggcctgggggcttcttggcagctggggagaggttgggtttctggggcagagggaaactgggttggagagagtccggggcagatgtgggaagatgggggtagggggcgtgctgagcagtttccttctctgactctggtgacccttctaatagccaaggctgtgttccattagaatttttggcctgcctgggtggcttatgcctataatcccagcactttggaagcctgcggcaggtggatcacctgtcaggagttcgagacctgcctaacgtgttgaaaccctgtctctactaaaaatacaaaattagccaggtgtggtgctgcatgcctgtaatcccagctacttgggaggctcaggcaggataattgcttgaacccgggaggcagaggttgcagtgagccgagactgcaccattgcactccagcctgggcagaaagagcgaaactccgtcccaaaagaaaaaaaaaaaagaattcttcttctttaagtgaatagactttatttttttgatctcctcgtgtctgttgcctggtcggtcaccccggttcctcctgggctcagagaagcctctagagctggggtctaacgtggggtggccctgctgcctggagacactgagtgatttgcagttgtcattgggggaagctcccggtatggggtgggtgaggccagggatgccactcagcaccctgaagtgcccaggacagcctcacctcagagaaccatccagccccagtgtccacagggccgaggggtcatgccccgccctaaggggctggtcaggatttcctgctttggggagaccttcatacccttcctgggggacctgtgacctggcctggtccctcctccaccccaggcgcttgcccgtcaaagctaacactgggtcttccctcccagctacaacctcctgttctttgcgtctggaggaggcaagtttaactaccagggaaccaagcgctggctggaagacaacctggaccacacaggtgagcggccccgggtgggggtgggggtgccgcggtggtggtgccgtggggaggcacggaggcccaggggttgccatgggggcagccaggaggcacagagggagggccgggggccacttcctggtccccacccaccccgccagctctcggtgtcctgcagactccagcctgcttcaggacaatgtggccttcgtgctgtgcctggacaccgtgggccggggcagcagcctgcacctgcacgtgtccaagccgcctcgggagggcaccctgcagcacgccttcctgcgggagctggagacggtgggtgcccctttcatggatgggtccggagctctgcggagcacacacatcggggccgggttggggcatcctgtcccagggtgtccttgctgtccgcccctcaggctctgagggccacactgtgtcggggtcgggctggggtgttctgtcctggggtgtccttgctgtccaaccccggggctctgaggggcacactgcgtcagggccgggctggggtgtcctgtcccagagtgtccccttgtccctccttacccactgctcattgcccgccggggctccagcaggccttagggggaccccgggggcaggtggatttctcctcattttgcaccctcgggggttctgggaggcccctggagcatttggggaatgggctggggtggccgccatccccgcctgccctctgctaatggcgcctccggctgcaggtggccgcgcaccagttccctgaggtacggttctccatggtgcacaagcggatcaacctggcggaggacgtgctggcctgggagcacgagcgcttcgccatccgccgactgcccgccttcacgctgtcccacctggagagccaccgtgacggccagcgcagcagcatcatggacgtgcggtgagcgcggcagcacctgcccggcccctcctagggctttcctgggggctgagccactggtcgcaactgcagaggccatgagagcctggagggagcggcccccacacacaggctgcgaggaaggggccggtgcgtggccaaggccggctgcacggtcaggccgttcgcaagctcttccttactggggctagggagggcgaggccagcagcctgaggtcgtggccccatataggacccccagaccccgtcacctgttgagttaggagcaagcagctcctgcctctgggcctcttcagggccctgccacagcccgaaagtcctgcctggccccggccaccgtcttggggagcctggcccgccaccacaccccggcccttcctcgccccgcctccctctgggcactgtgtctctggcttcttatgtcctctgaccctgtgtcctgcccgtctctctgccatcatgtgagcccctgggcaggcttttgtggagcctggaactgtctggccaccccaggcacactcctggccagtcctggcaccagcaggtgggcgccgtctcctcccccagcgcccgcagtcccggcatagatccttcccgttcatccactctgctctgcggtcactgggccctcaggagtggtttgagctcagccatcggaggcctgcagaagccagtggcgggagggaggggcacatccctgggtaatcgcagtcctggaaaggatggaggtggcggtcgcccaccagccaggaaagattgccaggaaatgagggtgggtgcacggctgtcccagctgtgctgagctctctcaagaccaccaggggtcagcccaggagggccacctgggatttgcagagggtcccagaatggattcttccaccaggacggaatagtccagtttaaattctggaagagcagaaaaccgagtcagaaggaaccaaggcctcagggcgtgagccttacctgcgcacagggacgggtcagggcaaggggcctggaggtgtggggcccccagtgaatctgcatctacatgttagccaagtagttaaagctaagcttaatttttttttttttttaaagacagagtctcacggtctcctaggctggagtgctgggattacaagtgtgagagctaccttgcctggcccaaagtccacattttaaaacattgtttttgaatcgtgaaggtcccgggtggattctaagaccctgacccgtaacacgaggatcattgcagaggccctgactcgagtcatctacaacctgacagagaaggtgagccctgagccctctgtgccgccagacccagccccagccctgcccccggccccggccccacccctggccccagccccactgcaggggcctggactcagggccatcccctcctctctccgcaggggacacccccagacatgccggtgttcacagagcagatggtaagggggccaggccagtgggtgggtgggtgggcggggccaggccatgactaccaccaccgtccctacagcagatccagcaggagcagctggactcggtgatggactggctcaccaaccagccgcgggccgcgcagctggtggacaaggacagcaccttcctcagcacgctggagcaccacctgagccgctacctgaaggacgtgaagcagcaccacgtcaaggctgacaagcggtgaggctggggctccgcgctggccccgttcagcctggggccgagggggacctccccctactgcatctcccaccccctcacccctgggggatgccaggtggagcaaatacaaagagagggtgggatgagggccggacacggcggctgtgcctgcaatcccagtactttgggaatccgaggcaggtggatcacttgaggtcaggagttcaagaccagactggccaacatagtgaaacctcatccctactaaaaatacaaaaattaggcggatgtggcagtgggcacctgtaatcccagctacttaggaggccgggacggaagaatcgcttgaacccaggagttggagaccaacctgggcaacatagcaagaccccatctctacaaactttttaaagtttttatttatttgtctttgagatggagtcttcctctgtcacccaggctggagtgcagtggcgtgatcttgtctcactacagcctccatctcccggcttcaagtgattctcggacctcggtctcctgagtagctgggattacaggcacccgccaccatgcccggctaattttttttaatttttagtagagatggggtttcaccgtgttggccaggttggtcttgaactcttgacttcaagtgatccgcctgcctcaacctcccaaagtgctgggattgcaggtgtgagccatcgtgcccagtctccatctctacaaacccttttttaagaattagctgggcgcagtggtgccccctgagaaagtgctctctccccagggacccagagtttgtcttctacgaccagctgaagcaagtgatgaatgcgtacaggtgagtggtggccagcgggacctggagcccttcaccccctacgggttacagccgaggggactgcggcccacgggggtctaggggttcatgttactgccgcgcaccatcctcgacctcagggaccctgctttctccacagagtcaagccggccgtctttgacctgctcctggctgttggcattgctgcctacctcggcatggcctacgtggctgtccaggtgagcagtgcccaggctcaggtggggcaggggccgcccgccgggaggagctgggctgggcgtctccaagtgcatcctggcccctggctcagcctagagtcacatgacctggggctctggccccgcccacatcctcactccctcctgctgtgtccccagcacttcagcctcctctacaagaccgtccagaggctgctcgtgaaggccaagacacagtgacacagccacccccacagccggagcccccgccgctccacagtccctggggccgagcacgagtgagtggacactgccccgccgcgggcggccctgcagggacaggggccctctccctccccggcggtggttggaacactgaattacagagcttttttctgttgctctccgagactggggggggattgtttcttcttttccttgtctttgaacttccttggaggagagcttgggagacgtcccggggccaggctacggacttgcggacgagccccccagtcctgggagccggccgccctcggtctggtgtaagcacacatgcacgattaaagaggagacgccgggaccccctgcccgatcgcgcgcggcctccgcccaccgcctcctgccgcaaggggcctggactgcaggcctgacctgctccctgctccgtgtctgtcctaggacgtcccctcccgctccccgatggtggcgtggacatggttatttatctctgctccttcttgcctggaggagggcagtgccagccctggggttctgggattccagccctcctggagccttttgttccccatgtggtctcagtgacccgtccccctgacagtgggctcggggagctgcatcacccagccttccccttctccgactgcagggtctgatgtcatcattgacagcctttgcttcgtgggggcctggcagggcccctgcctccccgacccccgacccactgcaaatccccgttcccctgcactcctcttctcccagcccatccctccggcccctgtgcctctgcggccccagcccagctcccagggccgtcacctgcttggccctggcccagctccctgccctgagtcctgagccagtgcctggtgtttcctgggctcggtactgggcccccaggccatccaggctttgccacggccagttggtcctccctggggaactgggtgcgggtggagtactgggaggcaggaggtggcccggggaggccttgtggctcctcccctcgctcctcgccctgggcctcagcttcctcatcaatagaaaggatgtgttcggggtgggggcgtcaggtgagaacgtttgctgggaaggagaggacttggggcatggcctctggggccacccttcctggaactcagagaggaaggtccgggccctcgggaagccttggacagaaccctccaccccgcagaccaggcgtcgtgtgtgtgtgggagagaaggaggcccgtgttgagctcagggagaccccggtgtgtccgttctttagcaatataacctacccagtgcgtgccgagcaggcttggtggggaagggacttgagctgggcaagtcctggcctggcacccgcagccgtctcccttccgtggcccagggaggtgtttgctgtccgaaggacctgggccggcccatgggagcctggggttctgtccagataggaccagggggtctcactttggccaccagttcttcggccagcacctctgccctccagaacctgcagcctggaggggtgaggggacaaccacccctctttcctccaggttggcaggggaccctcttctcccgtctgccctgcgggttgcccgcctcctccagagacttgcccaagggcccatcaccactggcctctgggcacttgtgctgagactctgggacccaggcagctgccaccttgtcaccatgagagaatttggggagtgcttgcatgctagccagcaggctcctgtctgggtgccacggggccagcattttggagggagcttccttccttccttcctggacaggtcgtcatgatggatgcactgactgaccgtctggggctcaggctggtgtgggatgcagccggccgatgagaaaataaagccatattgaatgatcgccaccagtgtttggtctgggggctgtgagaattggattgtgacaactgttgggggttcatgttcctccagggggtgacagtaggggcagggctgtgtggagagtacgtcactgacttgccctctgctggagtgaggctccagcctatcgtgggccaggcctgtgcccaaggctgctgggccgtgcaggagaggagggcctgtgtacagggtcttgtaggtgatggatggacctgtttcctgggccaccatcacaaagcaccaccaactatggggctcagaacaccagaaatccacccttagtgtctccgaagccccaagtccaaagtcagggtgttggcagggcccccagggcgggtccttcctgcctctcctcccagcttctagggctcccagcatcctcggcttgtggccgcgtcattccagcccccaccttgtccctgtcttccaaggacctccgtcacattggatcagggcccatcttgctccaggaagatgttccccctaactaatgacctctgccaagatcccatttccagttgaggctaaaggctgaggttgttttggacatgaatctgggaggactctgcaaccctggatggcgggcagtgggctgtgtgaagtcggcttccaaccccagccccaggttcagagaggtcccagcagggcaccatactcggctagctttggtttactgagaacctacacagcaggtgcagaactagggttggtccctcctggtcagaagccccggggaccctcccaggttctgcccggtgcccaggcccccttcctggcctgcccagctgtcgggctcagtaaatgctggtggagctgccatgtgtccctggcctgagatccgtgctctcggggaaggaggagaggcagagatgtgccggtgagaagaagcagggagaggtgggggcgtggggaggccagggcagctgaggaagctgccctgagggaggcagtgtcctgcagactggctggaagggagggtgtctgagctgcgacctgaatgatgaggcagccggggtgaaacctggaggagaagattgcaagcagaggcacagcccacctgtgcaaaggccctggtgcaggacggcaccgggcgtgttggaggaacagcaggaaggcctgtgtggctcgagcagagggagtgagggtggggaagggacagggcaggttgtgcagggcctggtgggccacggggaggacttgggctttgaccccagggcagctgggagccatggagggctgtgggtagaagagcgacaggccctgactcaggtgctcccaggcgccctctgacggctaccgcagggaggacagacgggagtggcgagggtttagcctaggaccgggtagaggtgactgggctggcacaagtggaggcagagaaggatgggctcatcctgttccccctccaccgctgtgttcctggagtgcagaggaggggctacagagatgcttccagaaccagtgtgtggcctggaccaagacctggactgctgggggcttcctgagcaagacccacatccctgcagtcaaagctgcctcttctcagaccagggaacttcagaaacaggcagggaacccacccccccaccagggtcccctaggaatcggcaacagagcctcaaacccagcacggggtctctgcctccccaaaacatgtggcaggagaagcttgttcaggagggagaggagggaggggatggacccagagcgaaaggcaggcagggcagggttgcaggaaaagaaagaggctcacctgactccggagcatggggccgctggccactggggatggaatggcgggggcagtgcttacctgaccccggagcatggggccgctggccactggggatggaatggtgggggcagtgcttgggcttccctgggcggcgagcagaggccaggttcggcccccacgtgctgtgtggccctggggcatgggggctgtgcctccctggaccaaattttaccagttcagggggctctagggtccaggggtttgaccttcttggggtcctgcgtgattctccaggagcttagcagggccaagagtggacagtggctgcccacctctgtgcaggcagaaggtggctttggccccatcgtggacccaggcaaaccccattttagaggaaaagccagcccatcatcttccctgctaacatacacaggtaatttttcctttttttttttttttttagagacagggtctcacacccggcatggtggcttcacgtctgtaatcccagcactctgggagtcagaggcaggaggatcacttgaggtcagagtttgagaccagcctggccaacatgatgaaaacccgtctctgctaaaaatataaaaattagccgggggtggtggtacacatctgtagtcccagctactcgggaggccgaggcagaagaatccattgaacctgggaagcggaggttgcagtgagccaagatcatgccactgcactgcagcctgggcgacagagcgagactttgactcaaaaaacataaaatagggtcttgctctgtcacccaggctggagtgcagtggtgcaatcatagctcactgcagccttgacctgggctcaagtgatcctcctgccacagcctcccaagtagctgggactgcaggcaaatgccaccatgcccggctacattttgtaaatatttttgtagagattggatcttgccatgttgcccaggctggtcttgaactcctggcctcaagcaatcctctcacttcagcctctgaacgcactaggaatacaggcatgaaccactgtgcccggccggattagtttcattcaactatcgattcagcgaacacttgaactctgctctgccaggtcctgtgccaggctcagggatacaggcgtgtgcaagagacgctggcctggacgccatggggctcgcagtccactgtgggagttggataataagtggtcaagtaggtgggctgccttcagatggtgatcaatggctgggtgctgttttacaattgagtccacactggaggctccctgaggagggactttgaggttttgttttgtttgcttgtttgtttttttgagacagtcttgctctgtcacccaggctggagtgtagaggccctatcttgactcacggcaaccttcgtctcctgggtccaagcgattctcctgctgcagcctccctgagtagctgggactagagaggtatgccaccaaattttgtatttttagtagaaatcaggttttggcatattggccaggctgaccttgaactcctaacctcaggagatctgcccgcctcggcctcccgaagtgccgggactacaggtgtgacaccacgcccggcctgtttgagtttgactctgtcacccgggctggagtgcagtgatgtgttctcggctcactgcaacttccttctcctgggttcaagcaattctcatgcctcagcctcctgagtaactgggactacaggcacctggctaaatttttttatttttagtagagacagggtttcaccatgttggccaggcttgcctcaaactcctgacctccggtgattccccgtcgcagcctcccaaagtgttgggtttatgggcgtgagccactgcgcccggcctggagggggcttttgagtgaaattggaatgacaaggattattacatcatgtggaaatgtggggacagtggttaaggcagtgagcacagccggtgcaaaggccctggggcaggatcgcgcctggtgtgttggaggaacagtgaggaggcccatgtggctggagcagagtgagctgggggagagagtgaggcaggagagagagggaggagggggagaaaggaaggggagagggaggagggagagggaggaagcagggaggtttcaggccatgcagggcctcctgggggaaggggagggtaaggagagcagaaatggtgtctgaccttcactgaatctggaaaggtcaccggcagccagaggacagttatgaaaatgaaacgaggccgggcgctggggctcacacctgtaatcccagcactttgggaagccaaggcaggcggatcacaaggtcaagagatggagaccaacctggccaacatggtgaagccccgtctctactaaaaatacaaaaattagccgggcgtggtagcacgcacctgtagtcccagctactcgggaggctgaggcaggagaatcctgtgaacccaggaggcggaggttgcagtgagcttagatcgtgccgttgcaccccagcctgggcgacagagcatgactctgtctcaaaaaaaaaaaaagaaaggaaatgacatcgagctgcccgtgttgggcacatgtgaggcctctttccggggctccctcggtgccctcaggcctcaccttagccccggtcaaccctgggcagcagtgaacgaggaagacaaagacgtccccccagcaagggtattgtactacctcccagaggccaggtccaggggccatgatctcttcctggaggccttttaagttgataaaacatcagctaatgtcccttgaaaccagcacagtttctctccagaggtgctgtccactctatgcatctttctcattttttatattttttgtagagatggagtcttgctatttgcacaggctggcctctgtctcctggcctcaagtgatgctcccgcctcagcctctcaaagctgtgggaatacaggtgtgagccaccgcgcctgggcccctgggtagatgctttttttttttttttttgcttttttttttgagacggagtttcgcttttgctgcccaggctggagtgcagtggcacgatctcagctcactgcaacctccacctcccaggttcaagtgattttcctgcctcagcctcccgagtagctgggattacaggcacccgccaccatgcctggctaatttttttatttttatttatttgtttatttattgagatggagtcttgctgtgtcacccaggctggcatgcagtggcacaatctcggctcactgcaacctctgcctcctgggttcaagtgtttctccggcctcagcctcctgagtagctgggattacaggtgcgtgccaccacacccagctaatttttgtatttgtagtagagacagggtttcaccgtgttggtcaggctggtcttgaactcctgaccccgtgatccacctgcctcagcctcccaacgtgctgggattacaggcgtgagccactgaacctggccaatttttgttatttttagtagagatggggtttcgccatgttggccaggctggtctcaaactcctgacctcaggtgatccacctgcttcggcctcccaaagtgccgggattacctgtgtgagccaccgcgcccagacttgggtaattgcttttcagatgctcatgttacagatggtaacatggaggccgagcacaaggggttcagacgtggattggacgaatctgagggccacgccattagccacatactgagtggagtgggcgaaaagggcccaggtttaggtcaccgggataaccagtgtccagagatggacggcacttacctgaggccacagagcaggtgaggatgagccccagcgggagcgagtagccagggagccggcctgcctcctgggctggggagaagacactggaagagcctggagaccgcccagcctccctgattccacgctagacatttaattctttctttttcttttgagacagagtctcgccctgtcacgcaggctggaatgcagtggcgtgatcttggctcactgcagccaccgcctcctgggttcaagtgattctcctgcctcaacctcccgagtagctggaatttgcaggtgcccgccaccatgcttggctaattttttttttttttcagccagtggtgtaaattttcctttaagagatagtaaggtgttttctgtcacccaggccggtgtatagtggcgcaatcatggctcactgcaacctagacctcccaggctcaagcgaccctcccacctcggcctcccaagtagctgggactgctggtatgtgccaccgcgcccggcttatttttgtatttttgtaattttgtagagatagggtttctctttgttgcgcaggctggtctggaactcgtgggctccagcgattctcctgccttggtctcccaaagtagtgggattacaggcgtgagccaccacgccagccacctggtcaaatgaagctttttttttttttttctgagacggagtctggctctgtcgcccaggttggagtgcagtggcacgatctcggctcactgcaagctccgcctcccgggttcacgccactctgctgcctcagcctcccgagtagctgggactacaggtgcccgccaccacgcctggctaattttttgtacttttagtagagatggggtttcaccgtgttagccaggatggtctccatctcctgacctcgtgatccgcccgcctcggcctcccaaagtgctgggattacaggcgtgagccaccgcgcccggccgcaaattaagcatttttaaaagagctgattgatatcaaggaaaacatcaaatagtactggtgcccctcacacccattaggatggctaccattaaaaaaaaaaaagcgtgttttcccagcactttgggaggccgaggcaggtgaatcacttgaggtcaggagttcaagaccagcctgaccaacatggtgaaaccccatctctgctaaaaatacaaaaattagccaggcgtggccgggcgcggtggctcacacctgtaatcccagcgctttgagaggctgaggcgagcggatcacgaggtcaggagatcgagaccatcctggctaacacagtgaaaccccgtctctactaaaaatacaaaaaattagcccagcgtggtggcaggtgcctgtagtcccagctactcgggaggctgaggcaggagaatggcgtgaactcgggaagcagagcttgcagtgagccaagatcgctgcaactgcactccaggctgggtgacagagtgagactccgtctctctaaaaaaaaaaaaaaaaaaaaaaaaagccaggtgtggtagtatgcacctataattccagttactcgagaggctgaggcaggaaaatcacttgaacccaggaggtggaggttgcagtgagccaagatcgtgacactatactccagcctgggtgacagagcaagtctctatctcaaaaaaaaaaaaaagaaatttaaaaatagaattgccataagagccagcattcccactcctgggtatattcccagcaaaacggaaggcatgagctgcatcctgcaaaattccaggtgccttgacttgccccctcagagaaatggggatgagagttcctgctgggtgtatggcagacaccgtgaacagtgtcaccgtgaacagggacacagagatatttgtacacccatgttcacagcagcacaattcacaataaccccaaaggtggaaacaacccaaggggtggtggacagaaaaatggatcaacacactgtggtccatccacacagtggaatattactcagccatgaaaaggaagggaatcctgacgcaggctacagtgcggaggcatcttgaggacctcaggctcagtgagagaagccagacacagagggacaaatgccgtgtgattccactcctaggaagtccctggagtcatcaaattcacagagacagaaagtaggatggggatgccaggggctggggagggagatggggagtgagtgtttcatagactcaaagagtttcagtttgggaagataaagttctggagagggtggaggtgatggttgcacagccacgtgaatgtgtttttaacgctgctgaactgtgcacttagaagtaggtcacgctgggcacagtgactcacgcctgtaatcccagcacttcgggaggccaagacgggtggatcacctgaggtcaggagttcgagaccagcctggccgacatggcgaaaccccgtctctactaagaacacaaaaattagccaggcatggtggcgggcacctgtaatcccagctacttgggaggctgaggcaagaattgcttgaacctgggaggtggaggttgcggtgagctgagatcacgccactgcactccaacctgggtgacagagcgagactgtctcaaaaaaaaaaaagaaaaaaaaaaaagaaaccgggtgcagtggcttatccttgtaatcccggcactttgggaggctgaggcaggcagactgcttgagttcaggagttcaaaaccagcctaagcaacatagcaagaccccatctctacaaaaaataaaagaattcgctggcattgtggctcgagcctgtgtcccagctactcgggaggctgaggtgggaggatcacttgagcccgggaagttgagatttcagtgagctatgattgaaccactgcactccagcctgggcaacaaagcgagaccttgtctcaaaagaataaaatacaaaatggttaagtgtattattttgttatgtgtattttatcactgtttaaaaaaaaaaaaaaaaataagccaggcgtggtggcttacgcctgttatcccattactttgggaggctgaagtgggtgattatctgaggtcaggagtttgagatcagcctggccaatgtggtgaaacctcgtctctactaaaaatacaaaaattagccagtcatggtgacgcacgcctgttgtcccaactactgaggaggctgaagcgggagaatcgcttgaatccaggaggcggaggttgcagtgagccgagatcgcactgctgcactccagcctgagtgacacagcgggactccgtctcaaaaagaaatagataaatagcccctggagcccacagctctggcaaaatccatgaaggtggaaaacatgagctgcatcctgtgaagttctgggtgcctcgacttgcccctctgagaaatggggatgacaggtcctgctgtgtgcacggaggacaccgtgcctggtacgtggcagataaatagtcagtgtcaccctgagctggacgggcctgggggcctgggagggggtccgtgtgctggccggcaaggcagagacgccttgacgccgcatggcgtgggtttgagaccaggcagccggtgagcccagttggctttgggaagctctgaattcctttgagcaccgaagagaaaagaataagctgtgttggcttcgatacccaaatcctccatctgacagccgtgactgctaaatcggctctgcttcccttcctgttttcaagttttagactttctcgattccaaagtgattcacggtcgtcgtgggaagacgagaaaaattcaaaagaagaagaaagaaagaccgggcgcggcggctcacgcctgtaatcccagcactttgggaggccgaggcgggtggatcacgaggtcaggagatcgagaccatcctggctgacacggtgaaaccccgtctctactaaaaatacaaaaaattagccgggcgtggtggcgggcgcctgtagtcccagctactcgggaggctgaggcaggagcatggcgtgaaccccggaggcggaggttgcagtgagccgagattgtgccactgcactccagcctgggcaacagagcgagactccgtctcaaaaaaagaaaaaaaaaaaagaaaaacctaaggaggccaaggaggaggaagaagaacaaaaggcttgcagattccttttttttgtttgtttgttttttgttttgagacggagtctcgctctgtggcccaggctggagtgcggtggctccatctcagctcactgcaagctccgcctcccagttcaagcgattctcctgcctcagcctcctgagtagctgggatcacaggcacccgccaccacgcccagctaatttttgtatttttagtggagacagggttttaccatgttggccaggctcatctcaaactcccgacctcaggtgatctgcccgcctcggcctcccaaagtgctgggattacaggtgtgagtcgccgcgccctgccactcccacgcgctttacttcctcagtaacatccatggcacgggcatcctgcagtgaccgatgcccaccagactgcatccgctaacaagacagggagaccggcctgtggtacccagatgtgcccaagctcacagcctcactattctccgtgctcacagcctcgctattctccaggctcacagcctcgctattctccaggctcacagcctcgctattctccgtgctcacccacccccttagctgtgccacggatgaaattcaggaggcagaatgctgggtttaagtgctcagaagtcagacccgaattcggttgggctcttgttttgggtggaagaaagaggaggaagaggctgaaaaaagtgcatctttggctcataggagtttgtgagtttctcttttgattttgttttcttttgagacagagttttgctcttgttgcccagggtggagtgcgatggtacagtcttggcttactgtagcctggacctccctgggctgaagcgatcctcccacctcagcctcccaagtagctggaaccacaggtgcctgccaccacacccggctaatttttgtattttttgtagagatggagtcttgctatgttacagctcaggctagtgtggaactcccgggctcaagcagtcctcccagctcggcctcccaaagtgctgggattacaggcatgatttttcttttttttttgagacggagtctcgctctgttgcccaggctggagtgcggtggcgcgatcttggctcactgcaaactccgcctcccgggttcaagcaattctcctgcctcagcctcctgagtagctgggactactggcacacaccaccacgcccaactttttgtaatttcagtagggatggggttttgccatgttggccaagatggtctcaatctcttgccctcatgatgtgcctgcctcggcctcccaaggtgctaggattacaggtatgagccaccacacccggccaaattttagacacggggtttcaccatgttggccaggctggtctcgaactcctgacctcaagtgatccacttgccttggcttcccaaagtgctgggattacaggcgtgagccactgcgcccggccaggcgtgatttttaaaattcttattaaggactctcccagaacaccagaggctcacggggctctgagcatcctgcttgagtctccatggagacgaagcctatgtctcctggccgactccaccagccccagtgccacgctgtgcccggccaagcctcagctgagtctaagcacctgcgtctgtgctgggccgagtggcaggatgttgtgggagaacccctgaccccttgcccagctctgctcgtcacccagttctgatgttctgttccatctgggggtggccaggaggctgccagtaacagcaatgatgaatagccattcactgagctaagctcccagacactctgctaagcccacattttagttcatgagtccacaccagaccagggccttcaccatatcctctttttctttttctttttttttttttgagatggcgtctcacttggtcgttcaggctggcgtgcagtggtgcgatctcggctcactgcaacctccacctcccaggttcaggcgattctgcctcagcctcccaagtagctgggattacaggtgcatgccaccacgcccggctaattgtgtatttttagtagagatggggttttgccacgctggccaggatggtctcgaactcctgacctcagatcatctgccagccttggcctccccaagtgctgggattacaggtgtgagtcaccgtgcccggtccctctcctctctctttagtcctgcttggcaaataaggaaactggggctcagctgcctgatgtgtggggagatggtatgggatggtgggaagtgtgtgtgctccagagtctggcttcctgggtttacatcccagctctcttaccgtgtggtcttgcaccagccactggagctctctgggcctcagttccccctctaacgcgggtggacatttcatacaaatggcgtcacacgctgtgtggtcttctgtgtttgacatctttcaccaagcatgatgtgctcaaggtatggcttgggtcagagcctcattttttttttcatggctgagtcgtgttccattggctggatggagcacaaaatgtcctctaaagccaggcatggtggctcacacttgtcatcccagcactttgagaggctgaggcgggaggattgcttgagcccagaagtttgcgtacagcctggacaacatagcaagactccatttctacaaaaaatttaaaaattagccaggcatggtggcatggacatctgtggtcccagctactctggaggctgaggcaggaggatcgcttgagcccaagaggtcaaggctgcagcaagctatgatcatgccactgcactccagcctgggtgacagagcgataccctgccttataaataaataaataaataaaattgtaaattagccaggtgtggtggtgggagcctgtaatcccagctactcaggaggctgaggcatgagaatcacttgaacccaggaggtggaagttgcagtgagccgagattgcaccactgcactccagcctgggcgacagcaagagcctgtctcaaaaaataaataaaataagaattaaaaattaaattttaggctgggcgcagtagctcatgcctgtaatcccagcactttgggaggctgaggtgggcagatcacctaaggtcaggagttcgacaccagcctggccaacatggtgaaacccatctctactaaaaatacaaaaattagccaggtgtggtggcacatgcctgtaatcccagctacactggagactgagacaggagaattgcttgaacccgggaggcagaggttgcagtgagccgagataatgccactgcactccagcctgggtgacacagcgagactctgtctcaataataaataaataaataaataagtacgttaataaaattttacactatttgggtgtggtggggtgcaactgtaatcccagctactcaggtggctgaggcaggagaatcatttgaacctggtaggtggaggttgcagtaagccaagatcacaccattgcacttcagcctgggcgacagagagagactccatctcgaaaaaaataaaaataaaaatgaaaataaaattttaaatgggtgtaactctgtggagggaaaaagaaggctgagaaaggagataatggtgactgagcggttttagataaggtagatggggaaagtgatggggaattaaggaatgagccacacatcatctggggagagcacatcccagacaaagggtacagcccgtgcaaaggccctgaggcaggaccgcacctgacaagtgagaggaacagcgaggaggcctgtgtagctgcagcagtgaggagggggagagagggagcaggggaaggtggggacaaggcagaacaggacacgcagagccttgtgggcctcaagaaggacttgggctttaattatgggacatctttgggaagtgttttttttttttttttttttgagacaagatttcattctgtcgcctagaccagaggcagtggtgcgatcctggttcactgcagctttaatatcccagggatcaaccgatgctcccaccgcagcctccgagtagctgggaccaacggtgcacaccaaccactcctggctgatttttttttttttttttctcaaacagagtttcactcttgttgcccaggctggagtgcaatggcgcaatctcggctcactgcaatctccgcctcccgggttcaagcgattttcctgcctcagcctcctgagtagctgggattacaggcatgcacaaccatgcctggctaatttttgtgtttttagtagagacagagttttctccatgttgatcaggctggtctcgaactcctgatctcaggtgatccacctgcctcagcctcccaaagtgctgggattacaggtgtgagccatcgtgcctggcctgttttcttattttttacagcaatggcgtctcactatgttgctcaggctggtctccaactcctgggctcaagtggtcctcctgactctgcttctcaaagtgctgggattacaggtgtgagccaccacggccagcacgtattattatttttattaatattattgatgagtttcatacgtaaaggatcacgggcactttagagctgggagatacttcagtatttctcctatcctgtcattatcagtgcgagccagtctccctccttgttgatgacattattgatgagttacatacttaaagggccaaggacactttctatgtgtaagcaccctatagaactggaagatacttttaccatttctcctgtgctgtcgtgattagtgggagcactttgtcttgctcttgattaattattattagtgttgttattattaggtgttttttttttttttttttaccaagacggagttttgctcttgttgcccaggctggagtacaatggcacaatcttggctcactgcaacctccgcctcctgggttcaagtgattatcctgcctcagcctcccgagtagctgggattacaggcaccccccgccaccgagcccagctaatttttgtattctttagtagagacggggtttcaccgtgttagccagtctggtctcgaactcctgacctcaagtgatccacccacctcggcctcccaaagtgctgagatgacaggcgtgagccaccgcgcccagccatattattagtgttattaatattattgatgagttacctactttaaggatcacgggcgctttcaacgacaagccccctacattatcccagcaacttttgacattcttccggccgatgccctccgcgggagccggcggggacccctgggaagccggctaaggcccgtcccgcccgcagctccgccctcgcccacccgtaggcggggcccggggccttccggcctcagtttccccccgcggcccggggatgcggggaggcgccggctgccccgcgcggcgcggccgccaggggccgctgcggagccgcctttgtggtcccgatgccggggcgggcgcgggcgggaggagggcgcgggggcccgggagggaggcgggaggcgcggccgccgctccagctgcgagtccgcccgccgcccgccgccgccgccgccggctcggtcccgcgcccgccatggcccgcctgacggagagcgaggcgcgccggcagcagcagcagctcctgcagccgcggccctcgcccgtgggcagcagcgggcccgagccccccggggggcagcccgacggcatgaaggacctggacgccatcaaactcttcgtgggccagatcccgcggcacctggacgagaaggacctcaagccgctcttcgagcagttcggccgcatctacgagctcacggtgctcaaagacccctacacggggatgcacaaaggtgggcgcccggccccctcccccctctccccctccctccgcctcccaccccaccttccggcatcttctctcccccatcaccatccctcctctgctcacctccctcctctgcctgcctctgccggagcatcggttcttaccccctccctcccacccacccctcctcccctctctgggggtgcagctgacagatccgagcgggccccctcccctcctccgccccctctccctccctccccaccttccggcatctcctctctctctccctctctctctccctctctctctccctttctcttctctcccatctccctcgacctctcatccttccccccacagcaccctctctctccctccctccctccctcacccttccatcccccagacccccaccccttcctccctccctcaccccactctttcctgcccgtttgccaggggagcctcgggaacgccggcacccctccctgcccccccacccccattcattcagcctccccaggccccgtcggggaagtttgcacctgcggactccattgctttggttattttcacaaagccaggccggcggggcaggtccggccgcgggggacacggatgcccaggaccccaggctaatcggtaactacaaaggaagacgggttgggggcgcccggctcggggggacgcgcccgcctcgcctgcctcgggtggcggagaggctcccgtcgctgcccaccccctggccccaccacctccgcgtggatcagcattctctcctccatttctctgccctccccctcccccgcctccaccttgggctcaagttgaaactggccgagcctcttagcaatgtgttggggtctcaggcccaagacaatgagcttggacgtgtccatctgggcagagcccaaattctggggtggacagggaggaggagggaggcgtgggcggcctcaggcctgtctgcctccctcccactggattctccctccgatggcatcccgggtgggggtgtccggcaattgtatccccagcccttggttcccatcatgggcccagcgtctgaattggggtggctttgacagccttccggtcaggtgttggggactgggggtgccacttcaaaggccttgtgctggacacccccggccctccccctcccatcctccaggaagaccctggagaggccttggggaaggaccggggcccatgacctattttacacccactttttccccagcgctgcgtgcccggtaagcatgaatgcatgtttattgaatgaatgaattgaatgaatgaatgaatgaatgaatgaatgaatgaaggggttcaagaaggccctagggagggtctggtgagatggggcccaggcctgtcacttcagctagaccctccagctggttatcttgagggaggaaagaaacccctccccattccccatctcttttcaaaaccaaccatcacacacacacacacacacacacacacacacacacaaaattgggcctgaaaaatctaactcctccatgtggcctaggagggcagaggggctcccatgcggcccccataagtcaatatctggagtccagaggtgataggtgggcttttcccacacgcccccacccctgggtacacccaaagcacccatttctagaaagattcccgtgggaatgggggagtccacatggccccccaaacggttgcattgaaaggccgctggttgagctctaggtcggagagacaggtgggggtgcagggactggagcatcctggtgactcttcttcatctttttttttttttccttcttatttttaaatctctgggaaacctgggcacgggagaagtgaggggtgaaggaggggctggggctgggttttcacctggccctgagcctcagtttccctgctgtcaacagagcaggaccatgacgcatccccagttctttttttacaggttggagaatgttggggtccctggggtacctcgggggtatttcccatttgcgggctttccttggagggtgagaattgagaagccgtgtgcacgacagccggcaatcaccctccactttttaggggtcccaggtccgtctgtgtgtgagatacaggggcttcacctcgtgtcgaaaatgggtccagtaccctcggggaagtgaatccccacctgcgtggggcctggctggacttcacctggtctttgcctgcaggtgcttggcacgaaggggtgggggggtgtcttcagaatcagcatctgtgatccaggtttgcgtttggggctcagctgtgtgacttctggctagtgactgcccctctctgggccctctctgggccttggctgaagggaggtggaatggtgaatgggaagtcaggatttttggggagaggagtgagttcagacacctgccaccaacatgaccttattagggctgtttctgggagccctggcgtggtttagtgtgcctgttcagagtggcagggccttggggatatggaccccaggcctggagagaaatccctttccctggatgcccggcggggcccatgagactgggcacaggagatctgtaaggagtagagtggggtgggatgagaacaccctggaggtgcacccggctcctggtacaagcccggagggggtcagctggtaccacctctagcccttccttggtgtccaggctgcagggacttgtttgatttccccatggaacccatcgccatggaggtgggctccgagtgacagcgcatttctgggaaactgagggcttgagagacataccctgggtcccacatttaccggagctaggcccccattaccccccctgccttcctcccaggccaggagaagcagctgtgcctgtatctgtgtgacataggggtgacaggttccccaaagccaagagtgaggcccccagagatggtgctggggatggaggggcccgtgacacctgacagccacagctggcctggccgaaggtggcgtgggggcagccagattcctagaggccgtgctgagactcagagaaaggcaggaggcctcatccaggagcggggcaggggtagggggagagggatgcgtcgaggtggtcttccgaaagagggcaggccctggggcgctgggtttgtttttaagagagagagagagagagagatgaggacacagagagagagagagagacacgcagggaaagagagacagagagacccacagagagacagagacagagaaacacagacagggagggggctgcagagagatgcaggcccacaggaagaccacaagcctgctcctgccagaactccgcatccagagagcggggacctcccccaggaaggacccccaccccaggccaggggctcaggccaagaactggaggctgggattggggctcccgctggcccccctgcagttcctgccccggggaccctccctccaaggcaggcacctctggagctgtggctgcccctgtctatggatggtggctgcctgggtgcccaccctgccaggggaaggtgcccacggtggtactggtccgccgctgccactgggccccccgtttatggtaatcgcatatacatttgcatgttaatgacaatatttgtcttaaagcggaggttgcgctgggggacggtgcaggtggggggggggcccggcgggggcccgggtgggggcccgcggtttccatgggagcaccagctgccggctcgactcgggagggggggaggaggaggctgtagcaggctgagctctgaggcgtgagattccgcgtgtgacgcaccagctccagggagaaggcgggctgggcggcctggcggggggaccgcgggagcagttggcacccctggtggtggcggggacagcggcagggggctgggggtggctggcagggttggccggcgtgtgtgtgtgtgtgtgtgtgtgtgtgtgtgtgtgtgtgtacgcgggcgcgcgcctgggaaggactcctgccggggtgctgtgtggcttcaagctgagcgcgcccctctctgtgcctcgttttcccctgctgcatattctctcctttatttaacagactttcataaggccccggagcctcacacctgtgactgtgacatcgtttctgcacctccctccccccgccccccgcttcaggcaaagagcatttattgaacgcctactgttttccagcatttatgcagagctgggcatttggtgtgaacagaattccttgtaggattcatgatggagtgggctagatgttaatccgtccacctgtatgaccaacatttattgagagcttgctgtgtaccaggccctgttctagaccctgggctactgggttgggcaaaacaaataaaatctgccatccctaccccccatccagacctcccctcccaccagattccagtttaggggacggagacagctggggaactgggcttacaaggcaccgagctcaggaatatgatggcaaaacacacaccagcagtgacagcccagaggggggccctgcccccgcaggagtggaggccaggagggccgcctggaggaggcagttagtgtaggagagtcgttgagagcttggagatgagatgagtctggtttccctgcgtcttgtggccttgggcagatgtcttcatccctccaggctgcagtgggtcttcccgtttcagaggaaatgagggaggtgagagcagaagtggcagggagagcagagaacagaagaggctgttggcatggggccgggcacagagtatgtgcttggtcagtgggagcgggcttgttacatgactacgctgaggcccgaagcgtgaggaggatgcactgacggggaaaggtgttcctgacaatgtgcgagggcccagaggggcgctaactccagggaagctcaggtgcagggaggatggagtttttgccctggtaggaaaggagcagaggggcttgggagctcagggtccccttcttctatggggctcacctgttgaggctcttccgaggggtcttagcttggggctggacccgggaggttatctctgaagtgggcttgtgtctctctctttcacccctcaaattggcaagtgaggccttggccattggaaacacctggtaggaccacactcattcattcattcattcattcattcattcattcattcacacaacacttcttgaaaaccttctgtggccttacctcgtactgagcaagaggggtctgaggccagagctagacattggcacctatagtccagtggtctggcttgggtcagagggaggggtgcagggttgagggaactggataatgaagcaggagctctgcctggaggaggggcattagaaatggggctttgaaggatcgacaggagctttccaggtggagaaagcattttatttatgcattcacagaaacacttactgtgttccaggccctatgatgggcatgaaacacagcagtgaacaagataggtacatgtcttgacttcctggatatagggagagggaactggatctatgaaggcctggaggcatgaagaatttgcacagctagggtagaggacggattaggtgaggcgtgggagatgaggctggagagtcagcatgggctggaccaggaaagcctctgatgctggactgagcttggactctttcctgagggcactggggagccatggaagagtttagagcagggaggaactcaggcagacctgcatgggaagcgggcttcacatcctgttaactcccattgccaccaccagcctcttcccagcctcccagccttgctcaaaatatgctcgtttccttcacacctggatggacaaaatagaagcttccagttggggtgaggcccacagtgtgggaagagagaaatacaaagaagcagatgtgtgttccgattacattggctcttagagaaccaagttcccctcctccatgtgaagcacaggaggagatcggagcccagagaggggcaacacccagcccaagtcatacagcagtacagctgggcttcacgcctcccagcctgagctttgacccgctctggaaggataaaaagaaacatgattttggaaacatagaccagggtcagagccatccagggaggctggctgtccttgaacttaagatgatcagggccaaagggaagggctgttaggtttggaagacactggcctagcaggagtccagttggtctggagtcatagtcaacatcagtgatatgtaagctctaggagggcagaaattgtgtcttgtttgccatttggaagtgagcttgtggatgaacaagggcatgaggaaatgagacgatctggggattggagaatggatgggctggctaacagatggatggagagatagatatgtgaatcaatggatacagacatggatggatggatgaatgggtgacagtgactctagatatgagtggatttgatggatagaaaagtgggtagatcagtggaaggtttgaatggattgatggatgggtgaacggatggatggatggatggatggatggatggatggatggatggatgggtggatgaatggatttatggatggatgggtggatgagtagtggatggatggatttgtagatgggtgggtggatggatggatggatttgtagatgggtgggtggatggatggatggatggatagatggatggatggtagatgggtggatggatggatggatggattggtgggtgaatggatgagcaggtgggtggatggatggatggatgggcggatgaatagattggtggatgatgggggagcgatggatgggcatatggatgggtgggtgggtgggttggtgggtcaatgagtgcatggatggatggatgggtaggtgggtggatagatgagtggatggatggatggatggatgcatgaatgaatgagtgaatgagtgaatgaatagatggatggatgatgggtagatggagaaattaatggttggatggatggatgaaaagatggatgggtaattggtggatggaatactagatagatgggtgggtgcatggatgaatggatggatggatgatggatagaagatgggatagactgaaggatggaaggatgcttcctcaacctttactaccttcctcctcacctggtgaatacgaatgttcagaacctttgctctcagacaggcttggttccaatcctggctccatttttaaatttctgtgtaatcctgaaaaagtcacctcatcttttctgaaccttagctactttgtaaaagagaagtaatacaggtagctagttcacagagcagttgtcaaaattggaactaatttatatgatgtggccaggcgtggtagctcacacctgtaatcccattgctttgggaggttgaggtgggaggatcccttgagcccaggagttcaagaccagcctgagcaacacagctctacaaaaaataaaaaccatatccaggtgtggtggtgtgcaactgtagtcccagccactcaggaggctgaggagggaggattgcttgatcacaggagttagagattacagtgaactatgatcgcaccactgcatcccagcctgcgtgatagagtgaggccctttacagagtgagtctgtaaagaaaaaaaaaaatgtggtgtgattcatgtaattaacctgaataatgacttgcatattgtaggtgttctccataaatggtcaggcagtcaaaatagtcaacaggctggctgcagtgcatcacgcctgtaatcccagcactttgggaggctgaggtgggaggattgcttgagcccaggagttccagaccagcctgggcaacatagcaagaccccttctctacaaaaaataaatttaggctgggcgtggtggctcacgcctataatcccagcactttgggaggccgaggtgggtggatcaccagaggtcgggagttcgagaccagcctgaccaacatggagaaaccccatctctgctaaaaatacaaaattagccgggtgtggtggtgcatgtctgtaatcccagctactcgggaggctgaggcaagagaatcgcttgaacccgggaggcagaggttgtggtgagctgagatcatgccattgcactccagcctgggcaacaagagtgaaactccgtctcaaaaaaaataaaaattaaaattaaaaataaataaataaataaataaataaataagtttttaaaaaagctgcacgtggtggcatgtgcctagagccctagctgcttgggaggctgaggtgcgaggatggcttgagcctggggaggtggaggctacagtgagccatgattatgccactgcactccaatctggaaaacagatctaaaccctgtctcaaaattcaaaaggcaacaactttattaagtctgtattgtgtgccagccattgagcgaggcttgaggacataaagcaattcagggggtaggagagactgacgataaactaggaaacaaataaagttgagataggtgtgaggtgagctgctgtgaacaaacaaactaaagatgtgtgttgggagatgacagctttccttgggggccagagatggcctttctaggaggtgacgtttgagacgagacctgaatgacagatgggaaggctgttatgctacaaccaagggaaaggcgttccaggaagagtgcagaggccctgaggcaggaccaccacatctggtgtgttggaggaacagcaaggaggcccttgtggctggagcagagtgaggagggggagagagggaggagaagagggcagagagggagtcgcgcaggttgttgagcgggttctgtgtgtcttggaaggactttggtttttaccccaagagaggtggagccatggagacctgtggcaggggagggacagggtctctcaggggaatatggacaatgtggattctgggtcctccattttttagatggggaaactaaggcacagaaggccctagaatgtgtcaggaagttctgccactaggcttatgcctggctcttctgaggagctcctgaagacggcggcgcctggaggtagctggaagacagagtggagcaggcccctcagtgccctcccattctcccagcagcctttgagggtggggtctttatatccaagaggatttgcattcttgtccctgaccctccactagggggaaggaccagagggcatgcctctagcagagctaggagccaccagaagaactttgtacacatagggaaatggaggcccaggtagaggaggggaggtcaattcaccagctcttggcaagggaggcgaggaagaggaagggatctagtgatgtggttcgttctctctctctctctctctccctccctctttcaagagattggcatctcactatgttgctaaggctggtctcaaactcctgggctcaagcaatcttcccgccttggcctcccaaagcattgagatcgtaggtgtgagccaccgcgcccagccatgatgtggttctcaatgggagttattctaggacacttggcaatgtctggagacatttgtggttgtcatgatttgggggtgcttctggctgcgagtggtgtcgagtgggtggaggccaggaatgctgctcaataccccacagcgcccagggtgacagatgatccggccccaagcatccacggtgcagaagctgagaaaccctggtccagggtacaccagtgacctggcttgggcagttggcacacagtgcagtgtcctggggatgaggcctgaaggtacctaggacaaaacctgggaatgcccttgacttccctctctcacaacaacaaccgcacctcctatccctccatcagcagattctgatggctctgccttcaaaacctctccagaatctgcccacttctctctcctctgccttcacctggtccagccccctcatccctcacctggaccagtgcagtccctgtgcccttgtccctggctcccaccttcgcgccccacagtctgtcctccccgcagcagccaccagagagcgcctgtgagcacctgagtcaggacccgtccctcctctgcctgcagccctccgtggctcccacctcccttagagtcaaagctgaagtcctcccgtgacctgcctcatccccttcataccatcccctgccccctctctcctcctcgctccctctgttccagccacactggcctccttgctgtttctgcaacaggcaaggcgtggtcctactccaggacctttgcatgggctgtgccctctgcataaatgttcttcccccagatactcacatagctccttcctttctcttctgtaagcttcacctttttttgtgaaacccctgtgatggcaggatttgtaatctagtcactcccagaactccaagttcctttttcctcctttccttttttttttcctgtgcaaatgaagacctctaacatactatatatatcgcttttaattttatttgctttttctccttcctaatagactgtaagcctcattagcacagagattttcacctttgtgtgtactgctgtgtcaccagtgcctaaaagagtgctttgaacatcacgcgaggatagatgggtgggtgggtggatggatggatggatgaataggtgggtgggtggatgggtggatgagtggatgggtggatggatgtgtggatgggtgggtggatggatgaatgaatggatgggtggatgaataggtgggtgggtggatgggtggatgagtggatggatggatggatggatggatggatggatgtgtggatgggtggatggatggatggatggatggatgtgtggatgggtggatggatggatggatggatggatggatgtgtggatgggtggatagatggatggatggatgaatggatggatggatggatggatggatgtgtggatggatggatggatggatgaatgaatggatggatggatgaataggtgggaggatggttgattggatgatggacaagtggatgggtggacagttgggtgggtgtatggatggggaaatttctggtgtagtgatggggactgaagccgtaggagtcaagatgcctgggcgagagatctggggtctagaatgagcctcaaggaacccccatatgtcaggctgtggagaggagcaggcagcatggaggctgaggagccacagccagcagggctggacctcatttggaggcagcatggttgacatagggtccaggaggaggacaccagggcctcagcacaggaatcaaggcatttatgcgtgcattgagggacagtaaaaagggggcagagagcccgtctgtctcggttttcctagtgaagttggggagaactttgggctaggaaggtggaggaggaagtggagaggatgagcagcaaagctgagtaggtggagaagggagggtcctgtgtccttttcagtgcatgtgtggcctcgtggttcccatttggtggatgagactgtgaaggctcagagaggttaagtggctggcccaagagcacacagcagaaaggtactgagctggctttgatccttatctccaatcactagattacagaactgagttaaagactaagaacttggagacccctgccatgcagggggttcgggatcaaaggggttgagatgggaggggggttcctggctggggagagaagaagaggatgaacagcaatgtattccctgtctctgtttccccaccaccatcggtgcatcgtaggtgctcaggaatattgaatgactctgagctaggcatggcagggaggggaaggacaaaaatgaatctaggccaggcgcgatggctcacgcctacaatcccagcactttgggaggccgaggtgggtgatcacctgaggccaggagtttgagaccagcctggccaacatggtgaaaccccatctctactaaaaatacaaaaaactagctgggtgtggtggcgggcctgcacctgtaataccagctacttgggaggccgaagtggaagaatcgcttgaacccgggaggcggagattgcagtgagctgagatcgcgccactgcactccagcctggacgacagagcaagactccatctcaaaaaaaaaaaaaaaagtaaagtaataaagaatggctactccggccaggcgtggtggctcacgcctgtaatcccagcactttgggaggccgagacgggtggatcacgaggtcaggagatcgagaccatcctggctaacacggtgaaaccccatctctactaaaaatacaaaaaattagccgggcatggtggcaggaacctgtagtcccagctactcgggaggctgaggcaggagaatggcgtgaacctgggaggtggagcttgcagtgagccgagatcacgccactgcactccagcctgagtgacagagcacgactccgtctcaaaaaaaaaaaaaaaaaaaaaaaaaggaaagtaataaagaatagctactgcatagagcagccgcctgggctgcttgttggcagtttttatggttactccttgaccatatgctaaacaagaggtggattattcatgagtttcccgggaaaggggtgggcagttcctggagctgaagggtcctccacttttaggataatttgcagacgttgccatggcgtttgtaaactgtcgtggcgcgggtgggagtgtctcttagcatgctaatgcattataattagcatgtaatgagcagtgaggatgaccagaggtcactttcacccccatcttggtttgagtgggttttggcagcttatttaccacatcctgttttataagcagggtctttatgacctgtatcttttgataccgttctgccaacctcctatctcatctcgtgattaagaatatctaacttgaggccggacgcggtggctcacgcctgtaatcccagcactttgggaggccgaggcgggtggatcacgaggtcaggagatcgagaccatcctggctaatacagtgaaaccccgtctctactaaaaaatacaaaaattagccgggcctggtggcgggcgcctatagtcccagctactcgggaggctgaggcaggagaatggcgtgaacccaggaggcggagcttgcagtgagccgagatcacgccactgcactccagcctgggtgaaagagagaggctctgtctcaaaaaaaagagaatatctaacttggccgggcgccatgggtcacgcctgtaatcccagcactttgggaggccaaggcagatggatcatttgaggtcaggagttcaagacccagcctggccaacatggcgaaaccccctctctactaaaaataaaaaattagctgggcagtagtggcaagagttgtaatcccagttaccaagctcctattcaagatggagttgctctggttcaaacgcttctgacagtacttccctctgatatcccccaaaccctgagatcccgcagggcccaaaccagggttcatgtctttcttccaaagtgcacctcctcctgggttcctacctgggtttgttgtcccagggcttttgtaacaaatgaccacaaactggggggcttggaacagcctctcccagtcctggaggccagaaatcagctatcaaggtgtgggtagggcctcactttctccaaggggagggtccttcctgcctcttcagcttctggggactccgggtgtccttggctgatggatgcatcactgtggtctctgctccatcatctgtgcgtctgcgtctcctctcctctgtgttataaggacacttgaggccgggtgtggtggctcacgcctgtaatcccagcactttgggagaccgaggcaggtggttcacttgaggtcaggagttcgagaccaacctggccaacatgacgaaaccctgtctctactaaaaatacaaaattagcagggtgtggcggcgggtgcctgtaatcccagtactcaggaggctgaagcagaattgcttgaacacagtaggtggaggttgcagtgagccaagatcacaccattgcactctagcctgggcaacaaagcgagactccatctcaaaataaaaataaaaaataaaaattaaggatgcttgtccttgtgtttggggcctgccttcatctagcttgacttcatcccaaattccttattgaaatctgcaaagtctctttttccaaatcaggtcacatttcaggttccagagtggctatatcttttttaaaattttataaaattaattttaatttttttgagacagggtctcactttgtcacccagactggagtgcagtggtatgatcatagcttgctgcagcctcgacctcccaggctcaagggatcctcccgcctcagcccgtttagtagctggaactacaggtgtgaaccaccacacccagctgtttgttttttttttattagagacaaagtctcactacattgcccaggctggtgcaaactcctgagctcaagcaatcctcccgcctcagcctcccaagtagctgggactgcaagtgtgtgccaccatgcccggctaattgtttttaatttttactggagatggggtctcactgtgttgcccaggctcgtctcaaactcctgggctcaagccatcctcccacttcagcctcccgagtacctgggactacagatgtgagccatcatgcccggctaactttttttttttttcagtagagttggggtctcactatgttgcccaggctcaggatggatgtagctctttttcagggagccaccattcaacccattacatcctcacaccctaccatccaagtgcatcccagccatccttgcctcctccctcccctcccctcgtcccccaccaaagccctaccttagattttcctgtctttgtccccatggccctctggggtagtcttcaccttctcccatactgaccttgactctgccccctcactggcctccagtcttctgtcctgcactccagtcccttcttcgtgctggccccaggaggctctttcccgcacacacctctgactatgcccaacccctgctcaaacaccttccatggctccccactgcccttgacatcagtccagcagttctttgcctgtttcaccctcatctgtcccctccaatggcatcccccatctcctgcaacacacttttttttttttttttgaggcaagagttttgctctgttgctcaggctggagcgcagtggcgagatctcggctcactgcaaactttacctcccaagttcaagtgattctcctgcctcagcctcctgagtagctgagtagctggaattataggtgcacgccaccacacctagccaatttttgtatttttagtagagacggggtttcatcatgttggccagactggtcttgaactccttacctcaaatgatccgcctgcctctgcctcccaaagtgctggtattacaggcatgagccactgcacctggcccttctttttctttctttctttttttttgagatggggtctcactctgtcatccaggctggaatgcagtggcataatctcaactcactgcaacctctgcctcccgggttcaagagtcattcttgtgcctcagcctcctacgtagctgggactacaagcatgaaccaccacacccagctagtttttgtatttttagtagagagggggtttcaccgtgttggccaggctggtcttgaactcctgaccttaggtgagccacctgcctcggcctcccagagtgctgggattacagacgtgagccactgcgcccggccctaccacacacttctgaaagcctatgttccacacaccaggcaggctcttgttctatggccccagctccaagaatcatccttcaggaagccgtctccaagcagaaccaggttgccttcagagcgtccccagccctgcctttctcttggcccgggctgaccacacagggtgtggaggggacaggagtgtcaggctctgcctcctcctagcaggaggatcacagagaatcacttcccaaaaaagagcattttcctgggctggagactggagtgtccttttgggctgaggtccccagctgcccgggctggagaaacttatccattgagcagatctcatgttccccaaggatcccccaccttgatccccaatgtacccttggtacccttgggtctcgagagatttgtgtgcagtgcattgtctatgaacttgaagatcagttctttttttttttttttgaggcggagtcttgctctgtcaccaggctggagcgcagtggcaccatcttggctcactgcacccaccaactccctggttcaagcagttcttctgcctcaggctcccaagtagctgggattacaggcacgaaccaccacgcacaagccaccgcgcccagctaattttttttttttgtatttttactagagatggggtttcaccatgttggccagcatagtctctatctcctgaccttgtgatccacccgcctctgcctcccaaagtgctgggattacaggtgtgagccaccgcgcccggcctaaagatcagttcttgtccaggctttgaaaatagggtgggtgcagattgccaatcactgagcattctgaaccattgatcccaggtgggacttccctgtctaccccctccagaaccccaaggctctccaggtgtgcagcaaggctgcacacctgcctctggtgcccttgccatctggggcaggtgtgtggggtgggagtggctggggctgggacacggtgagaggctcacctggcgtgggtgggggataagctgtggctcaggctgaggcttccttcaggggatccctctgggtctaggatgcaaccaaccagagctctcacagttgaaatgggatccacagggccctcagcatttgatccagccccgtgtttctgacaaaggtggcactagtttgttgttgttgtgtgtttgtttgagacagagtctccctcttgcccaggctggagtgcagtggcgcgacctcggctcactgcaaccttatctcccgggttcgagcaattctcctgcctcaacctcccgtgtagctgggaccagaggcgcgcgccgccacgcccagctaatttttgtgtttttagtagagatggggtttcaccgtgttgggcaggctggtctcaaactcctgacctcaggttatccacctgccttggcctcgcaaaatgctaggattacaggcatgaaccaccatgcccggcccaaggtggcactattttaaggttatttctagggaagcaggtacggcaagaggctgtgttcttcctcatattccttgggggagaattttggaaaagatgcgaaagccaggcagtggatctcagctgttagtgcatggtctgcagagctagactacctagatttaagccctcgacatttggccgggcacgatggctcgcacctgtaatcccagtgctttgggaggctgaggcgggcagattacttgaggtcaggagttcaagactagcccggccaacatggtgagaccccgtctctactaaaaaatacaaaaaattggctgggtgcagtgactcatgcctgtaatcccagtactttgggaggctgaggtgggcggatcacttgaggtcagcagttcaagaccagcctggccaacatggtgaaaccctgtctctactaaaaatacaaaaaaatggccgggcgcagtgactcacacctgcaatcccagcactttgggaggctgaggtgggtggatcataaggtcgggagttcaagatcagcctggccgagatggtgaaaatcctgtctctactaaaaatacaaaaattagacagtcatagtggcaggcgcctgtaatcccagctacttgggaggctgaggcaggagaatcgcttgaacttgggaggcagaggttacagtgagccgagattgtgccattgcactccagcctgggcaacagagcaagactctatctaaaaaaaaaattagctgggcttggtggcaggtacctgtaatcccagctactcaggaggctgatgaaagagagtcatttgaacctgggaggtggaggttgcagtgaggtgagatggtgctgctgcacttcagcctgagcaacagagcgagactccatctcaaataataataataataataataataaagcctggacattctacttaccacctgtgtgaccttgggcaagccacttcccctctctgtgcccccatctctcatctgtaaaatgggaacaatgccagcagctactgcataggggctactatgagtattaaatgattcagtatagagtataagcttattcttttctttttcagttttttctttttttctttggtttttaatttttttgttttggggtatttgtgtatgtgtgtgttttttaatttttttctgagtataagcttattaacattaaatatcaatggagtttttttgagacaaggttttgctatgtcgcaaaaccttggctggagccaggctggaacacagtggcacaatcatgcctcactgcagcatcgacggcccaggctcaagcgattctcctgtcttgacctcctgagtagctgggaccacaggcacatgccacaacacccagctaatttttaaaattatttgcagagatggaatttgactacgttgcctaggctggtctcgaactcctgggctcaagcaatccttctgcctcggcctctgaaggtgccgggattccaggtgtatgccaccacacctggcccagtggactttattaacatcactgcacgtctgtgctgatggggaactgtacgagtttgcaggcgctgccgtaaccacacaccacagacacggtggcttaaacaacagaaatttatttttgctcagttctggaggccagaagttcgaaatcaaggtgttggcagggctggttccttctgaggctgtgagggagcgtttattccaggccgttcccctgtagcgttccttgtcttgtaaaggcatcgtcccatctccgcctgcatcttcacgtccccctgcctgtgcgtgtctctgtgtctatttttccattttttataagggcaccagtcttattggatcagggcccaccctgatgacctcatgttgactaattccatctgcaatgaccccgtttccaaataaagtcacattcggaggtcctggggattaggactgcaaatgatgaatttggagagggggagaagcacattcagcccataacaggaactgtgaatcaaagctctatttatccaggggtgggtaaacattacgcattttcaccagctagaaacgacaagcaaagaggccaagaagaggttgggccaagagatcacggaagccataaggaagattttcagcaccagggacagcgtcagggcgggcttttgtgagcatgcgtctgtgtgtggcgtgtgcatgggcctgtgcgtgcgagtgtgtgtgtgtatggtatgcatgcagtatgtgtgtgtgcgtagtgtatatggtgtgcatgcattattgcattgtgtgtgtagtgtgtggtgtgtgcatctgtatgtgtgtagtgtgtgtggtgtgcatgcattgtgtgtatgtgtgtgtagtgtgtggtgtgtgcatgcatctctgtgtgtagtgtgtggtgtgtgcatgcatctgtgtgtgcggtgtgcatgcatctgtgtggtgtgcatgcgtcttgtctgcgtgtgtgtgtagtgtgttttgcatgcattgcgtgtgatgtgtgtggtatgtgcatgcatctatgtgtggtgcacatgtgtcttgtctgcgtgtgtgtgcgtgtgtggtgtgtgtatgtatctgtgtgcatagtgtgtgttgtgcatgcatcgtgtgtgtagtgtgtggtgtgtatgcatctgtgcatgtgtgtgtggtgtgttgtgcgtgccttgtgtgtagtgtgtggtgtgtgcatgcatctatgcgtgtgtgtatggtatttgcatgcgtcttgtctggtatatgtgtgcgtatgtggtgtgtgtatgcatctgtgcatgtgtgtgtgtagtgtgtggtgtgtgtatgtgtcttgtctgcatatatgtgtgtgtggtgtgtgcatacatctgtacgtgtgtgtgtggtgtgtggtgtgtgcatgcatcttgtctgcgtgtgtgtgtgcatgtgtggtgtgtatatgcatctgtgcgtgtgtgtgtagtgtgtggtgtgtgcatgcatcttgtccacgtgtgcgtatgtgttgtgtgtgtatgcatctgtgtgtgtgtagcgtttggtgtgtgcatgcacctgtgcatgtgtgtgtgtagtgtgtggtgtgtgcgtgcatctctgtgtgtgttgtgcatgtgtctttgcgtgtgtgtgtggtgtgtgtttgcatctgtgcatgtgtgggtgtgtgatgtgtatatgcatctgtgcgtgtgtatgtggtgtgtgtatgcatctctgtgtgtgtgcgtgtgtgtttgcatctgtgtgtgtgtggtgtgtgtatgcatctgtgtgtgtgcgtgtgtttgtgtgcatgcatctgtgtgtgtgtgcgtgtgtgtgtatgcatctgtgtgtgtgtgcgtgtgtgtgtggtgtgtggtgtgtgtgtgtgtggtgtttctttccctttcactgcagagctcccagaccctggggctgatggccttaaatgttgctcagggcacctacccactccctagcctcctagggccaccaccctccaaaccctgcagacaaggagtccacaggcaaaaaaaaaaaaaaggaacctaggaagaaggttttttacccttattttacatctgcctgcagcccaatttcttgccgatcaaacctgatttctctcaggccttagggctcgttgtcttagtgtagttcttttgaagagcttggggaataaaattcggaaaacaaacatcaagaatagaccatcacatacaacaacggcaacaggaaagatgagcacatagactctgtgaagagctcccccaaagtgacaaggtgcccagcttcattaatagttcttggaaggtgcattaaaatctcaatgaaatacaactgcacgcccaccttaatgactaacatttaaaaggttggcaaaaaccaagcattagtgaagatgaagcactaatagagcccgacataggcacaacccacttcagaaaacgatttgaaggaatcgatgaaagttaaacacacgcctgtcttatgcccagcacgtccctcctgggtatgctttttgcattaaaatatacggacaaggccgggtgcggtggcttacgcctataatcccagcaatttgggaggccacggcgggtggatcacttgagatcaggagattgagaccagcctggccaacatggtgaaaccctgtctctattaaaaatacaaaagttagccgggcatggtggcggacacctgtaatcccagctacttgggaggctgagacaggagaatcgcttgaacccaggaggggaaggttgcagtgagctgagattgcgccactgcactccagcctgggcgatagattgagactcagtctctctctctctctctctctggctctctctctctctcatatgtatatatatatatggacaaggctgggtgcagtggcttatgcctataatcccagcactttgggaagccaaggcaggaggatcacttgagcccaagagttcaggaccagcctgagcaacatagcaagaccccatctctaataataatagtaataataataataacagctgggtgtggtggcatgcaactgtggtcccagctacttgggaggctgaggccagaggatcacttgagcctgagaggtggaagctgcagtgagctgtgatcacaccactgcactccagcctgggcaacagagcaagaccctgtctcaaaaaaacaaaaattggacaagactgttgcagagcaactttattcataattgccccaaatagcaaacatcccaatgcccacccatgggagaatggataagcaatttttagtgtattcataggacacaatactacccagaaacaaaaaggaactcccccatgatgcacacaaccacatgctgttgactatatattgaatgaaagaagccagacacaagggcggacctatgctatgatttcgtttatataagtccaaaaacaggaagcactcaatcacattgatacgtgatgcgcacatggtggggacaccatcgtgaaggcatacacgagagctggggtggttacccctgcaggatggagggggttgtgctggggtgggggacactaggacttctggtggcttcatggtggctgccactttttacttttgttgttgagacagtctgactgtgtcacccaggctggagtgcagtggcacaatcacagctcactgcaacctccacaccctgggctcaagcgatcctcctgccttggcctcccgagtagctgggactacaggcccctgccaccacgcccgactaattttttgtatttttagtagagatagggtttcaccgtgttagccaggatggtctcgatctcctgacctcgtgatccacctgccttggcctcccaaagtgctgggattacaggcgtgagccatcacgcccggcctaatttttgtattttttatagagatgggttttcgccatgttgcccaggctggtcttgaaattgtgaactcaagtgatcctcccgcctcagcctcccaaagtgctgggattacaggcatgagccactgcgcccggtctctctttctatgtctcgacccaagacatagtgtgacatagttgtcttgggtcgagacatagagatggttgtatggatttataatcatttgttacattgcacgcttacgtgttctgcacttttcagaggggtacattggtaatatatcccaattacaatgtttattgtggtgatatatgcataatatgaaatgtaccgttaaaaaatttttttttaattgagaaagcactttgctctgttgcccaggctggagtgcagtggcgtgatcttggctcattgcaaactctgccgcccgggttcaaacgattctcatgactcagcctcccgagtagctagaatagcaggttcccaccaccacacctggctaattttttttgtatttttagtaaagatggagtttcgccttttgggccaggctggtcttgaactcctgacctcagatgatccaccggcctctgcctcccaaagtgctgggattacaggtgtgcaccaccgcacccggcccatcttaaccatttttaagcatagagttcagtggcattaagtacattcatattgttctgcaatcatcaccactatctgatcttcagaacttttattttactttattttagagacagggtctcactctgttgcctaggctggattgcagtggtgctatcatagctcactgcagcctccagctcctgggctcaagtgatcctcccaccttggcctcctaaagtgctgggatgacaggcgagagtcaccttgcctggcctccagaacgttctcatcttcccaaactgaaactgtatccctgtgaaacactcactccccatccccctccccagcccctggcaccccccatcctgatttccatctctgtgaatctgatggctctgtggtcctcctatgaaacctctgtctgtcgttttgtgtctggcttatttcaccgagcatggtgttctcaaggttcacccacgttgtgtcaggtatcagaatttccttcctttttgtggctggataatattccactgtgtgggtcgaccgtattgtatcgatcccttcatctgtgaatggacgcctgggttgcttccgccttccggccactgtgaatcttactgctgtcaacattgttatacaaatatctctgttcgagtccctgctttcaattcttctgaatatacacccagacgtggaattgctggcttccgtggtaattttgtgtttcgtttctggaggaactgtcaaactgttttctgcagcagccgtaccattttacattcctactacaaacttttttctttctttcttccttccttccttccttccttccttccttccttccttccttccttccttcctttctttctttctttctttcttttcttttcttttcttttctttcttttcttaatgctggaaactgttgtcagctctgcctggtacccccagggttccagggggctttttggacctggggtgggttccctcggattccctaccccctccccaccacacagcccagctggcgggagcgaccagcaggtggccactttaattagctcctgcctggagaagtggacaccgtggagctccgtacagcgtgtccctgggagaccagggaccatagggggcggggtttgagggggaaccgagggtttgacaacatcggagcagcccacgatggtctcatttcacaggtccccagacaggaccactcagtcccctgtatccatcccaggacccctgacctcctgtgtgcaatccctaccccaccttggggaaacgtctttcaaaatacttttgatctaattaggctttcagggcgagggcgggttctcttgacttgcttgtctcctgtctctgtctctgtcaacgtctctggtctcccacccctaacgtcgcccaatcacagcctcactctgggccaccagagggctggccccgcccctcgcttcccaccctccgatccctaatgttgcccaatcacagcctcactctgggccactctatgggctggccccgccccttgcctcccatccctaatgtcatccaatcccagcctcactctgggccactccggggctggccccgcccctcacctctcctgattggtcctgatttctgccaccatgccacaccctctcaagctccacccccatccattggctggtccaacttgtggtcctctcagaccatcccctctccctctgataggggaaggtgaggcccagagagggggagcgcatgatccaaggctacactgctggtcagtggcagagcccactgctccctatcccagggccaggccttcttccatctttctgggaccactagtgccctccccatcctccccgctgggcagcccctctgcccactcccctcaccccaccttgtccagggctctcagcatctcttttctgagctcagccactgactttgttaatggctggacctcctctccctcttcctggtctcaccctttgcgggggtgtatgtgtgtgcaggggtggaacgggtggaaaacactgagccacttcgactgtcccctcccaaaacatggtggcttcagcatcctcttctctttttattttttgagattgtaataagatatacacaacttcaaatgtaccgtcttaaccattttaaatgcatggttcaggccgggtgcggtggctcacgcctgtaatcccagcacttcgggaggccgaggcgggcagatcacgaggtcaggagatcgagaccatcctggctaacacggtgaaaccccgcctctactaaaaatacaaaaaaattagccaagcatggtggcgggcgcctgtagtcccagctactcgggaggctgaggcaggagaatgacgtgaacccgggaggcagagcttgcagtgagccgagatcgcgccactgcactccagcctgggtgacagagccagactccgtctcaaaataaataaataaaaataaaaattgcacagctcagtggtattaagcatattcacacggttgtgcaaccatcaccaccatcatctccagaactttctcatcttcccaaactgaaactctgtccccatgatacactcagtcctcattcccctccccagcccctggcacctccccattttactttctgtctgtgtgaatctgatgactctagggacctcctaggagtggaatcacacaggatttgtccttctgtgtctggcttatttcactgagagtgacattctcaaggtgcatccatgttgcagcctgtgtcagaatttccttccttttcttggctgaataatattccgttgcgtggatgcaccaggttgtgtagatctatgcatctgtggatggaagcttgggttgcttccacctagtggccactgtgggtggtgctgctgtgaccatgggtgtgcccgtgctctcttaacacccccgtttctctcccttccaggctgtgccttcctcacctactgtgccagggattccgccatcaaagctcagactgccctgcacgagcagaagaccttgcccggagtgagtcctgtgtggtgtctggggaggaggggacaggggatggctctcagcctggggtgggagccaaggctcttcctgagattggctgtgaattctgtgtgtctcgggactcagaaagaggtatgaggagcagaggtatagaaatcatcataatagtgtgcatttattgagtgcctactgtgtgccgtgctctatatttcataccagagtggttgtgtgtggttgtgcaggttgtatactgcacaagggcacctggcccagtgtgtcgttgtctttgggttgagacctgaaggataaggaagcattagcaggcagagggcacagcatgtgccaaggcccgggggaggaccatgcctgacgtgttggaggaacagggaggaggcccgtgtggctggaacagagtgaggaggtggagaaagaaaggcgggaagggcaggggaggtgacagggctggttgctgaaggctgtgtggaccatggggagaagcatagaccatgcttgcttctcactataaaaaggaaaatgattttcctcgcttgtctttatggtgcaaacggagccacagttccttaacacaagggcttcttttttttttttttttttttttgttgttgttgttgttgttgagatggagtctcgctttgtcacccacgctggagtgcagtgtcatgatctcggttcactgcaacctccgcctcccaggttcaagtgattctcctgcctcagcctcccaagtagctgggattacaggcgtgcaccaccatgcctggctaatttttgtatttttagtagagacggggttttgccatattggccaggctggtctcaaactcttgacctcaagtgatctgcacacctcggcctcccaaagtgctgggattataggtgcgagccaccaggcccggccaacacaggggcttcttcatcacaatttctgtctgcagaggaggctggcctgggtgctgtctctgatgagtctctccttatttttattttttgagacagggtcttgctctgttacccaggctggagtacaatggctcactgcagcctccacctcctggggtcaagtgatcctcctacctcggcctcctgagtagctgggactataggtgcatgccatcacacgtggctaattttttaatttttgtagagacggggtctcattatattgcccgggctgatcctgaactcctggctcaagcgttcctcctgcttcggcctcccaaagtgctgggattacaggtgtgagccagcacacccagcctgatgagtctctcctggtcagctttgtcctctttgggtgggcaggaggcccctgcccccagtgaaggatgagtggtctccctgagccagtcaatccgggtccccaggccatgcctcttgatggagactgaaggaaccacagtgagccacggcgccccaccttgtgagctctggggcagggagctcacccttccctccggaattctcagggacctttcagcctccagggacatcagggcattcgtagccttcgtgcttggctgactgtaggaaatctgacgtgcgccttccagggacccgaggtcatggcatgagtttgacttgattctccatgagcattggaaggttctgggcctgggggtggcctctgcttggtcttgaagaatagagagcccctcttttgggtgtgatgtgatgcaagttagagtgtggggtctggcagccacatctgtgggctcgttgctcagctccatccttgctgtgtgacagtaagccagtgacttaacctctctgatcttcagcactggaagagaataacagggcagggtgggctagcaatctatagagaaggtgctcagtggagggcttcactgaggatgtgacatttgagaaaaaacctgaaagatggcatggaagggcactccaggcagaaggaacagcatgtgcaaaagtgatctagagtctgcggtaaattccctgaattcactgttcatcttggaccttctgctggtgcctacccaaaccaaccagaagctaaaaaagtacattaaaaaaaaaaagaaagaaagaaatcccacaaccgaacaaaaaatcaaaccaaccagaagctggagggcaggtcagtccatacagattagtgcccaggggcacagcagagttctagggaccatattagttatttattgctgcataacaaattatccccaaaataaagacttcaaacaataagcacttgttatttcacagctaccaggggtcaggaatttgggactgagtttgctgcatgatcctggctcagggaggttacagtcaagatatcagcaggagtttgtggttgaggaatctgcttccaagctggctccctctagtgactgttcaggaggcctcagtttctcaccacgtgggcttctccacagtgctgcttgagcttccttacaacatggcatcttcccccagcacacgtaaccaaagagtgatcaaggaggaagccacagtcccctttaagccctagcctcggaattacacaccatcatttccaccacattctagcaccagaagcccaggggtgcagagcagggggggcaaaggtggagggaggaactcaaggaacaaaccagctcaatactggacttgtccaaggttaggcagcctgcaagctgcagagtggggatttggaccttcatagtctgactccagaccctgtgctgttgcctaattcatctaagtttagtgaaccatgtttttgcttggcatcaggtcctgggggaagctctggtccttctgtccagagaaatctgtacatagatggagatttaccaacacttctaaggagtcctcccagctaagcacttctcccccattcctttgtcctcatttccctgatgaaggtaactgagacacaaacccagtctctattccactgtctgaggccttagggaccttggaactggttcttttcctgttgggggccaaaactgagctctgcactctgttggcagccaggagggaagatggaagagggtggaaggaccaagagccacgaaacctcatgcccttcttgccaggctggtgtcctggatctgagtccactttgagatgaagagatgccgcaatcaccagcagctccttctctgcatccatcttgaggggactctgtccttctctccatgcctactctccctgggtcagcccataaattcatagcttccatccatccatgcacctttccatccacccatcacccatctgcccatgtgtctacatgcctgcctacctgtcacccatctacctgcctatccattcattcattcatccatctactcatccacctacccacccacacatccatcatccacccatcctctcatccagccacacgtccatccatctacgcatccatccatccatccatctatccatccacccacccatctatccatccatccactgatttaccctttcatccatccattcacacactgatccatgtttctatccattcatccacccatccacccatcaattcatccatccatccatccatccatgcattcattcacccatctactcattacctacccacccacccacacatctattatgcatccctccattctcccatccagccacacacccatccattcacccacacatccatccatctaccattcatccattgagtcactcactcatctatccacccactcatctatccatccatctgttcacccatttgcccttttatccatccatccatccacccatccatccatccattcatccatccatctatccattactcatccacccacttgtctatccattcatctgtccatccatctacccttccatccatccattcattcatcactcactcttccacccatccatctattaattcatgtatacatccatccacctatctatcctcccatccacccacacatccattcacccatctacacttctttccatctatccaccaaatttttatcaagcacctactatttaccccacgctatgctaaactcccatcatcagttctgtgactggtcacctcctgagtgactcctgtggccgtcccccagtccccatccccctagacccaatggggctcaaactggctatggcacaccccccaattttttttgagacagagtctcactctgtcacccaggctggagtgcagtggcttgatctcagctcactgcaacttctgcctcgcgggttcaagtgattctcctgcctcagcctcctgagtagctgggattacaggcatgagccaccacgctggctaatttttatatttttagtagagtcggggtttcaccatattgactaggctggttttgaactcctgacctcaagtgatccacctgcctcggcctcccaaagtgctaggattacaggcgtaagccattgagcctactgcccccgactgctttttttgaaccagtttctctccctcagtccctgggcatcagcctcttctcctccctcctcctcgcccccagagctcatggcccccacatcctgccctctcatttgttgccttctctctgcttccacctctgtgttctcctgagttcaaaccttagcttcccctctcccaagctgtgtaatcttcaacaagcatctttcccctcaaacctcagttttctttatctccaatatgggtaacactttctccacctaacaggctgcagagaagatttaaagacgtgaaggtgggtcaggcgcggtggctcatgcctgtaatcccagcactttgggaggccgaggcgagcagatcatctgaggtcaggagttcgagaccagcctggccaacatggtgaaaccccatctctgctcaaagtacaaaaattagctgggcgtggtggcaggggtctgtaatcccagctactcgggaggctgaggcaggagaatcacttgaacccaggaggcagaggttgcagtgagccaagatcacgcctctgtactgcagcctgggtgacagaacaagaccctgtctcaaaaaaaaaggaaaggtgcgaagtggatactatttttggaggtgttaagcctttatattctggtccttggccatctttagtttctaaaaatttctcactccccagacactgacgacccagccagggttcccacccctaaagtattcgtgggtaactgcctctcccgcctggagaatttctaccttactttcaaggtaacagctggccgtctcctccttctgctcatccctgacctctcagggctgggggtgtctgtgtctggctctgactcccccagattgggagcccctcaagggcagtccctgggctgagtcctccaaacccctttgttcattcagcatttactgagcatctgacttatgacagaatgaggatacagtacaaacagaaaataagcaagccagtgagaacaacattgagacaagaaatggggtgactttcagagcaatgactcaggacggaggtttcatttattattattattattattattattattattattattattaatttttttttgagacggagcctaactctgtcgcccaggctggagtgcagtggcgcgatctcggctcactgcaacctccgcctcctgggttcaagcgattctcctgcctcagcctcccgagtagctggattacaggcatgtgccaccgtgccatgctagtttctgtatttttagtagagatggggtttcaccatgttgaccaggctggtctcaaactcctgacctcaagtgatccaccagcctcggcctcctaaagtgctgggattacaggcgtcagccactgcacctggccttattattttttttctgagacaaagttttgctgtgtcgcccaggttggagtgcagtggcacaatcatagctcatagcacgatcatagctcatggtacgtcccactaatttttaaactttttgcagagatgggggtctcactatgtagcccaggcccgtcccgaactcctgggatcaagcgagcctcccacctcagcctcccaaagtgctgggattacaagcgtgagctaccagattgtgcctggctgggagttccatttagacagggtggtcagggaaggcctctctgaggagatggcctggagaggaggaagccgtgcactctctgcaggaagggcgtttctggcagagggaacggccagtgcaaaggccctgaggctggaccatgcccgaagcatgtgaggaccactgaggtcagaggagtgaagaagagtgagtgacggggagtgagggggagagtaggtggaggagagggggaagaggaagcagagacaggaccgccacagtgagcagcttgaattttgttccaagggtgactgggaccaggggacagtagcaaccagaggaacgatctggtttgtttgtttccacttttattattattatttattattattattttttttgagaccgagtttcactcttgttgcccaggctggagtgcagtggtgcaatctcggctcactgcaacctctgcctcccgggttcaagcgattctcctgcctcagcctcccgagtagctgggattacaggcatgcaccaccatgcccggctaatttttgtatttttagtagagacggggtttccccatgttggtcaggctggtctcgaactcccgagctcagatgatccgcctgcctcggactcccaaagtgctgggattacaggcatgagccaccatgcccagcctccatttttttttatttatttatttatttatttatttatttatttatttatttatttatttgagacagaatctcactctgttgcccaggctggaatgcagtggtgcgatcatagctcactgcagctttgacctcccacctcagcctcccaggtagctaggaccacaggtgcacaccaccatacctggctgatttttttttttttgacagagttttgctcttgttttccatgctggagtgcaatggcacgatctgtgctcactgtggcctccacctcccgggttcaagcaattctcctgactcggcctcccaacctggaattacaggtgcctgccaccaagccaggataatttttgtatttttagtagagatggcgtttcaccatgttggccagactggtctccaactcctgacctcaggtgatcctcccaccttggcctcccaatatgctgggattacaggcatgagccaccacgcccagccctgtgatttttaaattttaaatttttgatttaatttttttttttgtagagacagtggttttcctatgttgcccaggttggtctcgaactcctgacctcaagcaatcctcccgccttggcctcccaaagtgctgggattacaggcatgagccactgcgcccggcctgtgtctgtgtccctttgcttttctcttagaaggacacttctcattggatttagggctcagcctacatccaggataattttatctcaagatccttcatttaattacatctgcaaaagacctcttttctaaataagggcatatccacagatccccagggctaggatttggggatatatatatatacatattttttatttttattttttagagacagggtcttgctctgtcgcccaggctggagtgcagtgttgcaatcatagctttttacagccttgacctcctaggctgaagcaatcctcctgcctcagcctcctgagtagctgggactacaggcacatgccaccacgcctggctagttttttattttttgcagagatggagtcttgctatgttgcccagactggtcttgaactcctgggctcaagcgatcctcccgcctcggcctcccaaagcgctgagattacagacgtgagccactgtgcttagcctggatttatcttttggggagccaccatctaactcactccaggggtgaccacagaaccaatgaccaaatgtcagggtgacccagggacagcaccctgagggagaagcaggcagcctgcgtggacgatttagtgaagggtggacagggtggcttcttgaaggagggaatgtttgggatgagtcgagagatggaaggattttcacagatggaggtggagatgggggtgagtggggacaaaacttaccaagatttggaggccagaacatgcccagtgtgctgttgagtggcagctcatgggagcctctgtcagctaatgaagggggtcaggttaggtaaggaggggtctcaaccagggtgatcctgcccccgccccaggacactggctgctgtctgtggacatttgtggttgtcacgacttggggaggagatgcacctggcatggagtaggtggaggccagggacgctactcagcaccctgcagtgcccaggacggccccaccccagaaagcaattcaaccccaatgtccacagtgcccgggggagagatcctgtgttcattactttggggaaaaagttgaatcctctccctgctcacatcagacaccagaataagctcccgatggggtagacagtagaaaccaggaggaccccagctcctgggactcacctcctgtctccctccccactcagggtgcggattttaatgtgtgcagcctcctgggacctcagcagggaagcgggtcatgggacatagtctcttgggggtctgtggaatcccctaacctggggagggggtctcaatcaggggtgatccagcccccaggagacactgagcaatgtctgggaacatttacggttgtcacgacgtgggggtgctgctggcatggagtgggtggaggccagggacgctactcagcaccctgcagtgcccaggatggcccgactccagagaacgatccggccccaatgtccacagtgcccgggtgggagagaccttgcctaggaagataaggagcaagtaatgttctggaagagtgttatctaatagaaagagaatgtgagccacatatataatttaacatgttccaggagcaatatttaaaaagtaaaaaagaaacaggtgacattaattttaataatatatttcatttgaacccaatatatcccaattcttaccattttaacatgcagtctatgtatttctatttttctttttttatttattgagacagagtctgtctccatcacccaggccggagtgcaggggcgtgatcttggctcactgcaacctccacgtcccgggttcaagcaattctcttgcctcagcctcccaagtagctgggatcatgggcacccaccaccacgcccagctaatttttgtgtttttagtagagatggggtttcgccatgttggccaggctggtctcgaattcctgacctcaggtgatcctccctacctcaaatgatccccctgcctcagcctcccaaaatgctgggattacaggcgtaagccaccgaagactggctaaatatatgtatgtattttattttattttatttttagacatagggtcttgctctgttgcccaggctggagtgcagtggcaagatcatggctcactgcaaccttcacctcccaggttcaagcaattctcctgcctcagcttctgaagaagctgggaccacaggtgtgtgccaccacacctggctaatttttttttttttttttttgagacagagtctcacgctgtcgcccaggctggagtgcagtggcgtgatcttggctcactgcaagctccgcctcccaggttcacgccattctcctgcctcagcctccctagtagctgggactacaggcgcccgccaccatgaccggctaattttttgtatttttagtacagacggggtttcaccgtgttagtcaggatggtctcgatctcctgacctcgtgatctgcccgcctcggcctcccaaagtgctgggattacaggtgtgagccactgcgcctggccacctggctaatttttaatttttttgtagagataaggtcttgctacattgcccaggctggtctcaaattctggggctcaagcaatcctcctgcctcagcctcccaagtgttgggactacaggtgtgagtcactgtgcctggccatgactctactttttcatcagttttacaaaatgcacctacagatcaagggttgctgatagaaattaaatgtccaggtcgggtgcagtggttcatgcctgtaatcctagcactttagaaggccgaggcagggggatcatgaggtcaggagttcaagaccagtctggccaacataatgaaaccccttgtctactaaaaatacaaaaattagctgggcatggtggtgcatgcctgtaatcccagctattcaggaggctgaggcaggagaattgcttgaacctgggaggtgaaggttgcagtgagccgagattgcaccactgtactccagcatgggcgacagagcaagactccatctcagaaaaaaaaaaagaaattaaatgtccaaatctgtgagagaacaatatacaccagattttgaacatttagtatggaaaaattggattggatgtgaaatagctcattaataattttcaagaccaggcctggtggttctcacacctgtaatcccagtgttttgggaggctgaggtaggaggattgcttgagcccaggagtttgagacccacttgggcaacatagagagatcccatctctacaaaaaattttaaaaactacctgggcatggtggcatgtacctgtagtcccaaccacctgggaggctgagacaggaggatcacttgagcccaggaggttgaggctatagtgagctaggattgcaccactgtactccagcctgggcagtggagttttatttttgtttcagacaaaaataaaaacaaaaacaggaggggcccagaatggactgaagtttgctgaagcctgttctaggccaacactatccatggaacatttgcagtggtggataagttctctgcctgtgctgtgcagtgtgctgatcactagctccgtgaggctgttgagcctttgaattgggacgagtgtactcagaaactgatttttaaaattcatttattttattattttatttttttgagacggagtctttctctgtaccccaggctggcgtgcagtggcgtgatctcggctcactgcaacctccgcctccttggttcaagccattctcctgcctcagtctcccgagtagctgggattacaggcacgcacgcccagctaatttttgtatttttaatagagatggcatttctccatgttggccaggctggtctcaaactcctgacctcaggggatccgcccatcttggcctcccaaagtgctgggattacaggcatgagccaccgcgcccggccaagaaactgatttttaatgttacttagttttagtaatttgaaatttaaacttaaaccaccacatgtggctaatggctacaatatcggacagtgcaatccagcatgttctagaccgggggcagctgctgggttacagagcacagatccagagtgttctagactggagcccagctaccatatgggacgtagactgttctagaccagagaggtcaattactgtatcatggacagcataggtctagaatattctagacccagggtctggatcatatcggacagcacaaatctagagtctagaatctaaagcaagagaaaggcaagatttaaatttacacttaagggccgggcgcagtggctcactcctgtaatcccagcactttgggaggccgaggggggtggatcacccaaggtcaggagcctggccaacatgatgaaatccatctctactaaaaatacaaaaattagccgggcatggtggcacatgcctgtcatcccagctacttgggaggctgagacaggagaatcacttgaactcaggaggtggaggttgcagtgagtggagatcacgccattgcactccagactgggcgatagagtgagactctgtctcaaaaaatttttaaaaattaaaaaaatagataaatttgtggctcacgcctgtggtcccagcactttgggagaccgaggtgggcagatcacctgaggtcaggagttcgagaccagtctggccaacatggtgaaactccgtctctactaaacatacaaaaaattagctgggcatggtggcaggcgcctataatcctagctactcaggaggctgaggcatgagattggcttggattcaggaggtgaagtttgcggtgagccgagatcacgccattgcactccagcctgggcaacagagcgagattctgtctcaaaaaaaaaaaaaaaaaaaagggaggggagaccaggctgggtgctgtggctcatgcctgtaatcccagcactttgggaggcagaggtgggattacctaaggtcaggagatcgagaccaggctgattaacatggtgaaactccgtctctactcaaaatacaaaaaattagccaggcatggtgtcgcgtgcctgtaatcacagctactcaggaggctgaggcacacgaatcgcttgaacccgggagacggaggttgcagtgagccgagattgtgccactgcactccagcctgggcgacagaacaagacactgtttctagaaacaaagaaacaaacaaacaaacaaatatttcttaaactatttaaaagtactacacacggccgggcacggtggctcacgcctgtaatccccgcactttgggaggctgaggcgggtggatcacctgaggtcaggagttcaagaccagcctggccaacatagtgaaaccccgtctctactaaaaatacaaaaatgagccgggcgtggtggtgggcacctgtgattccagctactcaggaggctgaagaaggagaatcgcttgaaactgggatatggaggctgcagtgagccgagattgcaccactgcactccaggctgggcgatacagtgagactcagtctcgaaaataaataaataaataataaataagtaaaagtagtacacacacttacagaaaagtgcatgaaacataaatacttacaaaacaaacatcctgatgaccactacccagccggtcctctggaatccaccccatgccgtattactaagcccaactcttttctttctgctgaaggagccactatctggttgtcggtaacacgcctttgcttttcttcgtggttttactggatacagtggtgtgcccttggaattccagctactcagtaggctgaggcaggaggatcgcttgagcccaggagcttgcgaccagcctgggcaacatagtgacaccccatctgaaaaaaaacaaaattctctatggttttgccatttataaatatgtccctaaagcactaggtgtttttttttttttgcctgttttccttttaacctaacataaatgggataatagtctgtcatcttttatgtgtgccttcttgtttcactgttttttctttttctttttcttttctttcttttttttttttaagagacggagtcttgctgtgtcacccaggctggagtgcagtagcgcaatctcggctcactgcaagcttggcctcccgggttcacgctattctcctgcctcagcctcccgagtagctgggactacaggcacccgccaccacgcccggctaatgtttttgtatttttagtagagatggggtttcaccatgttagccaggatggtctcgagctcctgacctggtgatccacccatctcggcctctcaaagtgctgggattacaggcgtgagccaccacacccggccttttttttttttcttttttgagacagactcttactctgtcacccaggccagagtgcagtagcgtgatcttggctcactgcaacctctgcctccctgattcaaaatcttgtgcctgagcctcccaagtagctgggattataggcgtctgccaccacacccagctaattttttgtatttttaatagagatagggtttcatcatgttagccaggttggtctcaaactctgacctcaagtgatctgcctgcctccgcctcccaaagtgctgggattacaggcacgagccactgggcctggcctgttttacttaatttaatgatgacgagatttatctatggaaggccgggcgcagtggctcacacctgtaatcccggtgctttgggaggccaagaccagaggattgcttgagcccaggagttccagaccagcctgggcaacatagcaagaccccatctctacaaaaaaataagaaaactagccaggtgtggtggcttgtgcctggcgtcctagctattgaggaggctgaggtgggaggagcatttgagcccaggagattgaggatgcagtgagctattgatgcaaagcagacaagggcttagcctgggagggttcttggcttcacctgggaaagaattcaagggtgagctggtgatgttagcagcttttattgcaacagcagtgtaaacggcagtggaggtcctgctctctgcagagcagggccaccccatgggcagtgagccccgagcagaagttcagaggcagttctgcaggtatatttgtacccacttggttttgttttttgtttattttttgagacagagtctcgctgttttttgaggcagtatcttgagacactcccacccacgccatgacagtttacaaacgccatggcaatgtcaggaaattatcctaaaagtggaggacccttcagctccaggaactgcccacccctttcccagaaagctcgtgaatcatccatcccttgtttagcatgtgatcaaggagtaaccataaaaatagccaacaagcagcccaggcggctgctctatgcagtagccattcttgattactttcttttcttttctttttctttttttctttcttttttttgagatggagtctcactctgtcatccaggccagagtgtgatggcgtgatctcagctcactgcaacctctgtctcccgggttcaagtgattctcttgcctcagcctcccgagtagctgggattacaggtgcccaccaccacgcccagccaatttttgtatttttagtagagacgaggtttcactatgttggtaaggctggtctcgaactcctgacctcaggtgatctgcccatcttgacctctgaaagtgctggaattacaggcgtgagcgcaccacgcccgacccccacttttaattacatttaaattaagggacagattatgcagaaatttctaagaaaagagtgggacgtttcgggtcattgggtcattgccatggaaaggcggtaacttctaggtgttgctgtggcaacggtaaacggacatggcaccccggtgggcatgtctcagggagagctgcttcgactccatccctgttttagctagtcttcagtttggtcccgtatctcagccccgcctcctgagtcgagtctcacctcctacctcactatgatcgcaccactgcactgcagcctgggtgacagagtgagacccagtacaaacaaaaaaaaaaaaagaagaagaagaggaaagaaagaatcacgtgtgttgctgtgtgtatcagcgtcttgggcgttttcactgctgtctagtattccaggatgcaaatacgtcatttactcatccattcccctgttgggggacacttgggttgtttcacatgtctgttgagacaaatagagatcctcaagggtgttctttggtggacacacgtcacacttctctcaagtgtatccccaggatcatcagcctctgtggctaacacccacctgcttggcaaaggtgagacctgtggcgtgtgccaccttttcccaggaatgcctgcagaaatggagccagccttttggagtgagaatgggaggctggtgaggggcggatgggggctgctggggaggaagaccccccggcctgccagccacgtctgagcacgctcgctcatctgagctcctgctgacagctcctctgcagggagctgaagcacgaggttcgccctgtgctggaaaagcccacccaggcggctcacgtgcctgcacacgcccgcacgagcacagcctgggagtcggggaggagctgggtcacgtgagacaccgagacagccaccatctctcctgtgccctgcttcccccacccaagaaaacacctctgtgtgtgcgtgtgcgtgtgtgcatgtgtgtgtgtgtgtgtgcgtgtgcgtgtgtgttgggggacagtacgagtggacccttctgtctctttataagccaggaggggagtgatccaggtcatttgcttgactttccacttctaccccctcatcctggcacaggggagccccccccaccaaccgcccggcccaatactgctgctttctgaagagagggcaacccccccgtttccggttcccgcacaagtgtgacagcagtgtccatgggggacgtagtttaatcaactctcagcattctggaataggatccgaaattgaataacagaatcccagaatagatcctggaatggaccgtgggaccctggaattgaggctcagattccaggggaagctgctggctgggccgtcacagccccggacaccacttcccatccccaaagccagagcctggggttcctggagacagagagccccccaacactgggacagtgcggggaggggcagagggtccagcttctgtcccttggccagtgagggaggggccaggacctttgggactttgctgtctctttctttacaagagtcttgggggctgaggtacatcccagcaccctcagccaccctgctgctcatctgattgccctggaaaaagatgaatttgtgtgtctgcgtgtccttccctgctcagacgtggcagctgccttgagtaatgctgccctcctgaaacccctctctgtgcagggtcacagaggtggtcccctggcaggacccctacctcccctgcttacctccatgctgcaggacttggcccagagtgaaaccaaacctgagaatgggcaaggggccttaagacgcccagtgtgacagtttcacctccccagacctcagttttgtcatctataaaatggggccctagaagtagatttttgttttgttttgttttgcttttttgagatggagtctcgctctgtcgcccaggctggagtgcagtgatttgatctcagctcactgcaacctcggcctcctgggttcaagcaattcttctgcctcagcctcccgagtagctgggattacaggtgcccgccaccacgcccagctactttttgtatttttagtagagatgcggttttaccgtgttggccaggctggtctcgaactcctgacctcaggtgatccgcccgcctcagcctcccaaagtgctaaagtgctggggttacaggtgtgagccaccacacccggcacctagaagtgtttggaggactctgtaaggtgaggcctgtcaggtgctgaacgcagaacccgagctcggcacacaggcacagaataaatgaatgaataatgaataaatgaatgaaccatcctgggcacgtcaagctgcgagactcggggcgtcgtgtcatctttctgggcctgtgcagacaccaaattgtaagacactgcctggcaccagctcttgggtgacttcccgtgccaggcactgtgcccggcatgctcttggctgatggggatggagcctgggttttgctttccgaggagtctacaaacccgtgtatcatttccgctgtcatttgtggaccctgggctaagggtcttggtggggaacggagggtcacaaagcccagtgcccttgtgcccctgcctcccaccggagctaccccaagtgaggggcagtgtgtgtgtttagtggggaggggtcgtaatcaaggtaatgcctgggcaagacaatggaagcagatggagagagagcacggaagacttcagggaggaggtggcgtttgaggggtaaggatggggtgcagcgggggggcattctgtcaccagccacgttcagggggccatggcaggaggagcggggaggaatgactggggctgagcagcaaagggccctcaaatgccaggatcaagggctgagcctctacccagagagcaatagggagccacagcagcgtttagagcaggggaggggcttggcctgggtgtttcagagaggctggactggggcctaggtgggaggggaggaaggtcaatgggtgtctggggcagcccagataaggggtccaccttccttccttctctccacaccacttggaaataacccatctggggcttccactaaatctcttttttgagacggagtatcactcttattgccctggctggagtgcaatggcacaatcttggctcactgcaccctctgcctcccgggttcaagtgattctcctgtctcagcctcccgagtagctgggattacaggcgtgcactaccgcacctagctaatttttttgtatttttagtagagtcagggtttcaccatgttggccagggtgatctcaaactcctgacctcaggtgatccacctgcctcgacctctcaaactgctggggttacaggcgtgagccaccgcgcccggcccctcctctgaacctctactcttccaaaggcacaactttgcagatcccagagactccttggctgccccagcctcactgcaagacactcctcctgcagtcgttcccattccccaccccccaaggggcctcagtttccccatctctagcatacacaggtcagacagaaaggactgtttctcggccagccagtgcaagcccacccatgcccacagtgccaaaacgctccccagcccacaggaccccttggttggagggatgtctaggtccttaggacacctctcccttccccctctcccttttttggagatagggtctggctctgtcgtccacgccggagtgcagtggaagcgatcatagctcactgtggcctcaaactccttgggttcaaacgatcctccctccttggcctcccgacctctcccttctttctggtcttggtttgcccatctgtaaaatggaaatgcatgttttcatctcattaagttgtcttaagactaaacgggtcagcagatgtgggtgttgctccaacatgaaaaattgtttccaatcgttccaaactccgactcctactccaaaattcacagtgaattttccatcttcagtgcaggcccaggacagcctttggctcttcactctcctctaccctcagctctcccagctccaaccctgaccccatgggagagtttgtgtctggctctgtctcccgctccgccaggctggtgaagggtccttcctggagttccaaaattgaactcagccttgggggccccagaaccagagagtcatggggcacagcaggaatactgctgaagaaacggagaggaagggaagggtcagggaagggacgcagccatggggagccagagaaggtggaggagggagggagtgcactcggcagagacctcggtgggacagatggagagagggagccgggaggaggtgggcagagccagatggacgggcaggggcgacaggaggggtggggtgtggggagacccagatccccgcctggcacgcctcctcccggctcgggcgggcagcgcgggcagggcccgcctgggcgtcgggcgcagggcgcgcggcgcggggcccgagcgtgcagtgcggcgggtgcgcgcctgtgcgcccggggcggccgggcgggcgggcggcggcacgtggatgccagcctggcgcgcgtctccaggccggtgggtaaggcgggcgccgggccgcggggtggggacggccgggccgcggagctcggctttagagtggaggcctggagaggagggggctacccaactggcttcactggaccagaccaggaccccctctccccggccgaccctctccccgagctgacccagcggtggggggaagggacctcccagtaggaggcggaaggtcccaggctctgtggcgggtggggagatggggagcaggtacaccagccccccaaccccagaacaaggtgggggtggagggttcggtgatgggggcagcttctctccccgcggccgcccctccctccctccctcgtccatctccagaagattatatttaaatatctcttttgtgcaaggcaggagctgggctcgcccctaagaggcggtttccatggcaacaacaattgccagcttccgtgtggtgaatcagcgttgccatggcaaccccatcctcatctgcccaaggtgctgggaggggggaggaggtgagggccaacggaggtggggtgggaggggtggggggagcaggagtctggagctcctgcaggtgcccccccatctctccccacctcccctggcacccccccgcttccagcccagaagctggtcccatctggttgaaaccatctcccctcctgcctccagcctagcagggtgtggtacccaggtggaaagggccccggtgtgtatgcatgggtgatgtggggtgggaaaggggtccagctggctgggtgggggaagagcatggaggttttcctctcctaggtgatcagggtccctctgagggtgcggctgggcggcaggaaggttgggctgggaggattgggggcacaggatcagggaggcaggggcctcttggtttctggggccccaaagactgagttcaaattgaggaaagcatatgtgcccgggacatacactcaggaaggagggtgtcagaatgggagagggtcttagagaggggaggggacccagagatgaggaagggcctctgaagcaggagaggctcagcgagaggagggaagctgagggggtgggaggtggaaatccagaggggtctctgaggaggggagtgcaaaataaggggttgctgagggtggaagagtgggcacggagctggaacgggtcttagagaaggtgtcagatcacgagggacagagctcagtggggagactttgggggtcccaaaatggggaggaggcattatttatggcagtgggtggacagatcactgaatctggagtccagaaactcttcactcaccatggccttacacaaataacttctctcttagacaaataacagaaatctcaatgttgacatctgtagaaaggggtgaaaattgcacctctctctgaagcttgttgggcagctatgctgtgattagaaaacctggcatttggccgggtgcaggggctcacgcctgtaatcccagcaatttgggaggctgaggtgggcggatcacgaactcagcagatcgagaccatcctggccaacatggtgaaaccccatctctactaaaaatacaaaaaaaattagctgggcgtattggtgcgtgcctgtagtcccagctgcttgggaggctgaggctggagaattgcttgaacccaggaggtggaggctgcagtaagccgagatcacgtcactgcattccagcctggcaacagagtgagagtccgtcccaagaaaaaaaaagaaaaaaagaaaagaaaaaaaagaaaacctggcactttttcaagcgtattctctgctgaaactcaaaagtcagaagatcagaaagagcactttggaacccataggactcaggggatgtgggaatctatttcaagtttgtctgacttggaaaaaggtctgagagtagcactcattcccattccagacgcctttctgtgttggtggaagttggccacttccttctggcccattctgttcagcaggtttctccaattcctccatgtgtccttccccatgtggggagatgccgtggttccctgtctggagagagacagagcaagacatagacacttacagcctgagggagggggaggaaggagcccagaagagtgggaagagtccctgcatgggggcttttaagttgggttttgaaggttgagtgggagtttgccacagacatcaggttgggagaaggattgtgtcccaggaccagtggagatgcaaatgcctccccaactctcacatccctggagcctgttctcaacgatccaaaatagctcatacctaggacttggtatgttgtgagagttggtgccagtgagaatttttttttcattaaatatcattttcaatgcctggggtgggggacaaaagtgtctagaacaatgaatccagatggcaggctggtccactcaggtatgtccccacccaaagctcctggcatgactccacccaaagctcctgggagatgtggctaaatgtagctactttggtgtatcagtcagcactgctgagtaacaaactactccagtcattgtatttgttctcgattctgcaaagcttggtctgggctcagctggacggctcttctgttgggctctcctggggtcgctcaagcagctgcagtcagctgagacttgactgggcttagctgggtcagggtggcctcactcccctgaggtggctgtcagagaggcctctgtctccatgaggcccctcctcctcccctactgaggaggaggggcctcctcctgggcctatccacctggcagtctcagagttccaagagtggaagccacaaggtctcttgaggcttaggctcagaactcccgcaacttaacttccaccacattctatgggtcacagcaagtcacttggccaagttcaggtgccaggagtgggaaaatagactctagttcttgatggtaggaactgcaaagtcacatcgcataaagggactggaggaattgggcctatcacatttggggaagcaaggaggcttcctggaggaagggatattgttgggttttgagagctaagagttcgccacacagtttccgctgtaggtgggacagtgtgtaatttctttgactggggtgttagttgggtggtggggtgctgagggctggtggtgggaggtgggcagggctggcctgcagagctcaggcaaaaccccccgcctgccacacccccactgctaagcttgacttttcccttccccctctctctgcagatggcgcggccaatccaggtgaagcctgcggacagtgaaagccgcggaggtagttgtcatctctccgtggctgccaggctgggggttggcggaggaatgggagaagaaggaaaatctcttccttcctctctcctgcaaaaggggcagtggccgaggcctgtggatctggaactggcctccctgccccaaagcatgcagtagtcgcatgcctgctcacacaccttttggtggggggagaagcaggttccagagagcagaaggggctatgtccataggccccaagggaggatggggggtctagccaggtccagctgccttctcctgagtttgaaatactccactcccttcagggtgcaataactggggggcttcagacacagacaatgggggcctgaagggctgtggattgctctctggggtctccgtgtggaaatgtgtgtgtttatgtgtgcatgcttaaatgtgtgtgtatatgactgtgcacacctggcatgcctgtgtgcagatgtgtgtgagtacgtgcacatgtgcatttgtgtttctgcagctggtgcacataagcgcacatgtgtggtatgcagtggggatgccttcctgcctgtgtgcatgtgcgtgtgcccagcccgcgcatgggtgtgtgtgtttgcacatgtgtgcctgactgttggaggctgggcatgtgggcagacatgcaggctggggccagtgttgtctgtgtggggctggaccttggtgtcagggtgtgcccatggtgggggcatactcagctgttcccatgggacccaaatctagtcattcttggaaatttgtatatttcctctccatctcaagtggagactgaaggagggcagccagatttggttgagtggaggcatggagcaggagtgttaggatacctaggtatatgtaggagtccggtaaaggccctctgggatgggagcccctttcacactctccaccctggctgccagcgtgggacagggagtagcgaggtggggtctgtatgtctccatttttgtctctatttctctgtctctctctccatctccctctgtatctccttctcctttttctcttctcttgtctcttcatccctcttattctctctgtctctcacagtctctttcgcgcgcactctctctctgatctgtctctctctctccctgattctcagtctctctgctggtttctctctctccctcccacccccatgagtgacagctgccgagagcggtttccatagtaacccagctcaccgtccctaggagatgaagccaccacgttccccattaccagggagcatgcagttacccaagggggcagagctcacacaggagaggctggcccagctccggcctcagaccaggttccagcccagccccacccagcagggggtccagcctgccaaggcccctggtccactgagcacgtgaaccctcactccactccacagatggtgactgcctggcccctcttgatcccgacaaagttgggcaggggcctctgctgggcaccgtgaaagtgcggggaccatcagtgcccacctccgcctggcaggtccggggagcagacagaaagacagacagacagacagacagggacccaggcccggcgaggcagctcctagccctagtactcggtgcgggctctctgagtgcaccagagggaaaggtcatctccgcctggagggggagcagtggagcagagaccccaaaagactgcagggagggcattccaggcgggggcgccacctgggcaaaggccgggagatgggagcgtgcagggcccgtgggagggtggagagatccggggcagggaaagggcgcggctgggtcctccctcgcacgcgcagaaccggagccggcagggcccgggcgccgcgtcttcctgccctgccgcctccactctgctggagggagggaggaatcccggaggccctcccggaggccggggactcggctgaggtgggtgtcgccgcccacaggggaccggaagctgttcgtggggatgctgaacaagcagcagtcggaggaggacgtgctgcggctgttccagcccttcggggtcattgacgagtgcaccgtgctccgggggcctgacggcagcagcaaaggtgactggcgggggccggggcgggactgcgagaggggccgggctagctctgggggcggggcctgtggggagggtggggcctgcagcatggggaggagctggctctggggtgggaccctggggaggggcggggcttctccaggggtggagtctgtgggtgaggctgcaggggcggggccttggagaggggcggaattgcaggggcggggcctggggaggggatggggctgcagggtggggaggagctgcctctgagggcggggcctgtggggcagggccctggggaggggtggggcttctccaaaggtgggcccttggggagaggtgtggctgcaggggtggggaggagctggctctgaggatgtagccctggagaggcccgaggcttctccagagctgaagtctgtgggtgaggctgcaagggtggggtcttgggtaggggaggtactgcagggaggggtgaaatacgtagagttaggagggactggctccagggggagaggccctgggaagggtcggggctgagcatatagggggtggggctggccaggtggggcggggccaggccaataggaggctggggctggctgggagaagctggttcacaggggttgggtggagcagagactggtcccgcttgatcctacctgcatgctctctctgcatgctggctgtggggacgggccctgaagaggggcggggctgcggtggggtgggcggagatgcagaggcgtggccttggggaagggcaaggcttctccaggggctgcttatggatggggatgcaggggcagtaccttgggatgaggcggtgtctggtgggaggcgggggggcttctccaggtgctgcctgtgagtagggatgcaggggcgtggcttgtgatggggcggggtctggggaggggcggggcttctccacggacagagttacctgtgccctgtggtctcagattcctccacctgactattcgtaaaactgtttcctcctggttctgtctatgtgatttgtccatatgactgactggtggtctctggttgtgtctgtctgtctatcttcctgcctgagagtccaaatgacggtgtctggcggtctctgtccacagagctcatcatgtgggaccgactccactctggtctttcttaccttactagaactgaatgtgtctgacggtttcagaccattacctggttcttcctttttaaaattgagggctgggcgtggtggctcacgcctgtaatcccagcactttgggaggctgaggcaggtggatcacgagatcaggagttcaagaccagcctggccaagatggtgaaacccgtctctacaaaaaatacaaaaattagctgggcgtggtggcaggcgcctgtaatcccaactactcgggaggttgaggaagagcattgcttgaacccgggaggcagatgttgcagtgagccgagatcacgccactgcactctagcctgggtgacggagcaagactctgactcaaaaaaagaaaaaaattgagatgtcttccacatcctaccaaattcaccctttaaaaatgtacaatgaagtgctttttttttctattcataaaaccgtgcaaccatcaccactatgtaattccagaacattccaccccctccctccacaatatggctggcccttccatagtactctaccagtctggagccaggtgcagtggcctctgtatgttctatggactttgtcggtgggactgtgtttccattcacctgtgtctggtggtctctgtgtgtgtggctgtctgtctgcattagcctggctggctgtgtgggtgaccaggtctttgtctaactgtggctgtctgtctgtgtgattctcctccattctgacccttgatctggctgattgtccagctgtccgtctgagcaaacggctggctgtctttctgttatcagttctctctggctgcatgtgtctgacactggccatgtaggtctctgtgtcccctctcctgtggcccccgctcagccagtcctgtgaccccatcaccctctacctcttcttcttctcttggagcaggctgtgctttcgtgaagttctcctcccacacggaggcgcaggcggccatccacgccttgcatgggagccagaccatgccggtgagttggagctgcccttggccgtgggggtgggggtgggaaaggggtgagggggacagggatgaaacaggccatattcctaccgtcgctgtcatccggtagcccctggctgtccttcagagggggcacaggtggagaaagaggcgcagtccctggctgtggtccctggagtgggtatacacgtgtgagtgtgtgcagatgtggaggtgagtaggcaagcgaagtgtatgtgtgtgcatggatgtattacaagtgtgtgcgtgtgggtgagtgtgcatgtctgggtgtgagtgtgcccgagactgcatgcatgtgtgtgtgtgagtgcgtgtttgagtgtgtcattactagtaggcgagtgttatgtgagtgctgtgtgcacgaggggtgtgcgtaaatatgtatggataagtgtgccattgtgtgctagtgtagagatactagtgcgtgtgcgtgtatgagagtgtacatgtgtgtttctatgtgtgtgagcgtgtgtgtgagtatgcctgggccacgggggaggaagcacatgtgtgtgcatctgcaggtgcatttgtgggcaggtttgtgtgtgtgtgtgtgtgtgtttgtgtgtgtgcatgactgtgagtgtgtcagtattgtgggtgattgtgtacacgtttgtgagtatatgcaggtctgtgtgagtataggttgtgagtgggtgagtgtgtatgtgtgtacatgtaagggtatcctaaggggatgacacctgggttggatttgctgaggccaggagaggccctgacaaaaagaaaggctgggaggtggcaacaggtagcccagaggagccatagaagatggggccgcaatgcgaggctgagaagcctggactttctcctagggcagtggggagccacagacggtttagagcaagggaggagacaggccaggtcggttgcaaatatccctttggggctaatgtagaggatgggcagggtgcaagactagaggctgggaggccaaagaggaggctaggccaaggtccagctgaggtaggaggaggcctgagctggggccaggtggacagggaggagggctgatcagaaaacagacattagggtgagaatggatggggggcctgttgactcactggttgagggaggggtggggattggggacaggtcccagagtctgcagcagtgagaggctggggaggaccaaggaggcactggggactgcccttcccccgaggaaggagtccccagaagccattgttcctgcacccacatctccgaatctgctacaaggaagatgggacctgagaggaacaagccacctctctcagctcttaaaacccaggggaggggcttagttcagcacaagggcaagtgttcccaagctcagagatgtcccaggacagggctggtaggcgtctggaggagtgagttctctatcggaggaggcatgtcagcgaagacagggaggcaacagggtgcatcctgtgggagccagctcaccagggaggagctggtcgaaggggaagatattttccttcttgagccccagagtcggggtgtgggctggtttgtgaggggtgggaatggcctcctggcccctgcctcaggcctctcttttatttttttgagacagagtctcgctctgtcgcccaggttggagtgcaatggggcaatctcagctcactgcaatctccacctctcgagttcaagcgattcttctgcctcagactcccaagtagctgggattacaggcacgcgccaccacacctggctaaattttgtatttgtagtagagacggggtttcaccatgttggtcaggctgatctcgaactcctgacctcaggtgatctgcccaccttggcctcccaaagtgctgggattacaggcatgagccactgtgcccggccaccaggcttctcttgttaccgatatcaggacctgttgcagcatcctgactgcacagacagacactccctggctcaccgctgcttcgactgcccagggctgcctgttggtggatttcagcccagccctgtggcacctggacagccatggagtgggatggcagtcacatgggtttctgtctgtgccccagcaaagcagggcccccagtccccaccagtggctactgtccgctgtccactgggtggatgggccacaggttcatctgcctgcaaagggcacaaaaatctggggctggggctgggcgtggtggctgtaatcccagcactttgggaggtcgaggcgggcggatcacttgaggtcaggagttagagaccagcctggccaacatagtgaaaccccgtctctactaaaaataaaaaaaaaaattagctgggcgtgatggcgggcacctgtaatcccagctactcaagaggctgaggcaggagaatcacttgaacctggaaggcagaggttgcagtgagccgagatcgcgccattgcactccagcctgggcaacaagagcgaaactccgtctcaaaacaaaacaaaaaaaatccgggtccgaactgcctgctagctccagggcatggaggacagagtcaggatcatctacttgtcccgccttgttcctctcctgtggctggagtctcacctgttctcaggtgtgggtgagaattggaggctcacccatctgtgccccagttgttcctctctggagactggagtttcaggtgtggggtgacaatggcaggttcgtccacctgagcccactgttttccttcggaagctggtttctcacctgttctcaggtgagcggaagtcataggtgcctccagctgtgcctccctgttctccagcggcgggattctccatctgttttgagtgtgtggctgacagtcagggcccccacctgtgccccatcacagcctcctaggcctgggcgctgcacctgtgcagatgctgctgggcccaggatgctgatctccacgcggtcctcgctgtggccctggctcctggggtgggggcccgtggacatggctgacagccactggcattacacccctcacccaggaggcctgagctaacatgaatccagggaccccagagtcctggctacctcccagcccgtttccctccctgctcgccgctgcccctgcagggagcctcctccagcctggtggtcaagttcgccgacacggacaaggagcggacgctccggcgcatgcagcagatggtgggccagctgggcatcctgacgccgtccctcacattgcccttcagcccctacagtgcctacgcccaggctgtgagtgacccagtgacagcttcggggctccggctccgtctctctcagtctctgtctactctctgtcgggctcctgcctctccctccatctccctgactcagggtcctctcctggcgtggctgaaccccaactccaaattgagaccaagctcagaccgagcccctaaatccagaagactgagccctaatctcacagtaacacccaatcttggaccgagccccagaacctggctatgctccacgtctaaattaggcccaattctggctgaacctccaaatccagactgatcccaaactgagacctgacctgatcaagctccaccctggctgagacctgatcccaagttgagccccagctcctgactgaaccctgatcccaggctgagcctcaatttctaactaaaccctcatcctagatggagccttgatctcagtctgagcctcacttcctaaccgagccttgatcctagattgagccttagtcccaggctgagcctcgcttttctaactgagccctgatcctaggctgagccttgatcccaggctgagccccaattcctgactagattgagccctgatctcagcctgagcctcacttccgaaccgatctctgctcccaggctgagccttgatcccagtctgagctccaattctgatctcagcctgagccaagatacccagcctgacctcctcactagtaactggggtaccaagcctcccctcataagccatgatctcagggcagatatcaccccaactgtgacatgtcttcacccccagctcatgcaacagcagacaacagtcctgtccacctcgggcagctacctgagtcccggcgtggccttctcaccctgtcacatccagcagataggcgccgtcagcctcaacgggctgcctgccacacccatcgctcctgcctctggtgagcctcctccaggcacccaaggatgggtgggcagggctggagccagaactggcctccccatgaccctcttccgctctgcagggctgcactcacccccgctgctgggcaccaccgctgtgcctggcctcgtggctcccatcaccaatggctttgcaggtgtcgtgccctttccaggtgggcaccctgccctggaaaccgtctatgccaatggccttgtgccctacccaggtaaattggggtcgtcctctggggcctaggagagtggtggggaataaagatggtgtttctggaacaagtatgagtccctacatcacagtgcccagggaacagaagggcaggaaaaagggtgtctccgctgagcagataagagctgtggacacaggaagggaggccgtggcagggtaataacacattaaaacggtgcatctggatgtttctgagcttaaattccagttcagtgaccctggatgggctctttacgtccctgagcctcagtttgctcatctggaaaatggggcagataacatcagtagcctcagagggttgcattgacaatttaatctgtgtgcaaaaggcttcacacagggtctcactctgtcgcccaggctgcattgcagtggcacaatcttggctgactgtaacctccgcttcccaggttcaagtgattctcctgcctcagcctcccaagtagctgggattacaggcgcatgccaccatgcccggctaatttttgtagttttagtagagatggggtttcaccatgttggccaggctggtctcgaactcctgacctcaggtgattcacctactgcgcccagcccataaatcttaattattcatctgtgtcatttggggagatatcaatgcctggattcattcatttatccattcaacacagaatgaatgacccactgatttaggctgcacctgctttcatgaagcagaggtccttcctttctctatgctacacctacaattttagggcaaacatcttccaacatctaatttatgtgaagtaagttatctgtctttccaccatgtaggagaatttgtttctaactttttatttttttaattatttttatttatttagttttagagacagtgtctcactgtgtcactcaggctggagtgcagtggtgtcgtcgcagctcactgccgcctccatctctggggcttaagcaatcctcccacctcagccttccttgtagctgggactacaagcatgtgccatcacgcccggctaatttttaaatttttgtacagacgggatcttgctgtgttgcccaggctggcctcaaattcctgggctcaagcaggcctcccaaagtgccgggattataggtgtgagccactgtgactggccttaacattttattttgaaatgattggaggttcacagggagttaccaaaataccacagagcagtcccaggtacccttcacacagcttccctgatgccagcagcttatctaatcataggtcactgtcaaacccaggaaactaacactggcaccatacaattaattcaactccagacggtattcaaatttcaccatttatttatttagcgacagagtctcactctgtcgcccaggctggagtgcagtggcgtgatcatagctcgctgcagccttgaactctcgaactcctgggctgaagcgatcctctcacctctcacctcagcctcccaagtcactgggactacaggcacgtgccattatgcttggctaattttcgattttattttattttttaagaaatgagggtcttgctatgttgcccaagctggtctcgaaactcctgggctcaagcgatcctccttcctcggcctcccaaagtgttgggatcacaagtgtgagccaccacacccagctgatttcacgagtttttgtatgcactctgtgcacgtgtgtgtgtgtgtgtgcaggggcggttaattgccattttgtcacagatgcagacttgtggatctcccacagtgaagatacagaactgcttcttgcccacaaagtgaactccttcctgccacccctttgaagtcacagtcaccaccactatcccctgccctccagcacactctccattcgggcagaattgtttggctgaatttttccccagaatcatcagctttggtggcctggacaacttcttccctcccctacccctttccctagcggtagcaggaaggctacagctagatgggggagctacagggtgtctgatgaggaaactcatgtggagagggagacggggcaggggatgggggcaggtggtgatttgaggtggaggctgaagtcctggtgaatccagggagtagagaggagtgaagggtcccccttgggaggcaaccgggtcgggatagggagagggagatggggacgatggtgatctctctctggagtccgagaaacccggattccagttcagcttctgccatttgctatctgagtggccctgtgcaagtggcttcaccttcctcggcctcagcttcctggtcctacagagggtttagcacagaggagaagctgggcggggtgtttgttgctgtccttgcggctcttaaggatcgggggtggatggaagacttctgctgctcccgccccactcagcccctctgtctgcccgcagctcagagcccgactgtggccgagacactgcatcctgccttctccggagtccagcagtacacaggtaggaggcagcccgcgtgcccgcgctgggccctggccccgcccccgcctagggccccgcccccagggcccgccccggacgtgtcgttcttctgtgcctagccgcgcctcctacctctggccccgcccctcagggcccacccttagccccttgtcctgtattcaaccccgggccctgttactggtcccaccccaccaccacctatacccgcaaacaggaccttcccttgtcctttaaggacagcgcttacccatggccttaccctctcatgttctgtgttggggagagggaattccccttgaccacgtctctagctctgacccaaccccagctctcggccctgccccttaccctccctcctgcagctcctagccccgcccctcacttcctgcctttactctgaccacgcctctctgataaagccccgcccctacctctggctctacttcttaaggcctggctgtgaccccgccctctgctgcggccccgccccttaactcatggtcctgcccacatagccctccatcaagtcacggccccgccccactcatgcccttcatcccagtcttgcccccgccctccactgtgaccccacccctcaagcaatggtcccgcccactctggactgtcctgtagccttggccccgccctctactgtggcccaacccctatacccctcccctcacgccatggggtccgcccccacccccccttccccgccccgtctcggtattggccctgccctccaccatggccccgcccctcaggcaatagcccctccccgtttcgtctgtgatcttggccccgccctctggcctggccccgcccccaaaccctccccacaaaggccatgatcacacccactcctgccttggccccaccctcttatggccccgccccctccccgcccagcggcccaggccgcccacgtggcctcacgcccctcctcgccctgtgtctcgctccggtctccgcagccatgtaccccaccgcggccatcacgcccatcgcgcacagcgtcccccagccgccgcccctcctgcagcagcagcagcgagaaggtgaggcggccgcaacctcccctgggcgccagccccgccctctgcccgccctgtccacctgcaggctccgtgtctggcccgggcctctgggacccgcggggctgagagtgcggcctgggggctggacaggccagagttgagtcccggtgcagccgctgacccctgggaatctccctctctgtttcctcctccgaaaagagaaccatgctcgccccgaccccgtaggaatagcagtgacttcctaccagccctctccagaaccaagagtgattctctggattttttggaaaggaaaccctttttgaggctggggcatggcacgatgaggtatcaggtaatgaggcctccccagtaaagccaaggctgtcgaaggagggagggattcgattctggagtctgacagtcagggttcaaatccatacagttcttgccatgtgcggtagatcccgcctgtaattacatagcgttttgggggccgaggtgggaggatcacttgagcccaggagtccaagaccagcctggcttagcaagaccccatgtctacaaaaaaattaaaaattggccaggtgtagtggtgtgcacctgtagtcccagctactcaggaggctggagcaggaggatcactgagcccaggaggtcaaggcttcagtgagctactatctccccactggactccagcctgggtgagagagcaagactccatctcaaaaaaaaaaaaaaaaaaaaaggccgggcacggtggctcacgcctgtaatcccagcactttgggaggccgaggcgggcggatcacaaggtcaggagatcgagaccatcctggctaacacggggaaaccctgtctctactaaaaaatagaaaaaattagctgggtgtggtggcgggcgcctgtggtcccagctactcgggaggctgaggcaggagaatggcatgaacccaggaggcggagcttgcagtgagccgagatcgcaccactgcactccagcctgggcgacagagcaagactccgtctcaaaaaaaaaaaaaaaaaaagaaaagaaaagaaaaaaatcccaagctggtaacaacccaagtgttcatcagcaggtaaatggataaataaattaggatggagctgcacgatggaacactatacagcagtgaaaaaggataagtagccaatactcacaacaacatggaataacttcacaggcagaatattgagtgaaagaagccagataaaaaagacttcacttaaatgaagttttaaaacagtaggccaatcgaggtggctcatgcctgtaatcctagcattttgggaggctaaggcaggtgaattgcctgagctcaggagttcaagaccagcctggccaacatggtgaaaccccatctctactaaaaatacaacaattagccgagcgtggtggcgtgtgtctgtaatcccagctattggggaggctgaggcagaagaatctcttgaaccaggaggcggaggttgcagtgagccaagattgcgccactgcacttcagcctgggcaacagagcgagactccatctcaaaaataaataagtaaattaaattaaaaaaataaaaacgaggaaagctggctgggtgcggtggctcacgcctgtaatccaacactttgggaggccacggcaggagggtcacttgagcccaggaggtcaaggctgcactgagccaagatcatgccactgcactgcagcctgggcaacagagggagaccctgtctcaaaacaacaaaacaacaacaaaatcaaaaatctttatcagtgacacgttaagagaaaagaaagatgggaacgtagtagaaatggtagcactgttttctccatgttatgtggtttagaaatgcatgagactacaataaataccgtgcttggccttggagaagacctagaatgtgcacgtggaaacggcatcgaaagggttgttgcatgtgactgtgaaacggtggagggagggttgtctgaaatcagacagatagcatgaccccggatggggaaggtgcagctcacagcacactgggggagctgtgggagggtgtgtggcatgcagcgtgtattttcttctgaaggtcagtgcagctggatgtgtttttcagcggtcgcccacagttttggtggggatgaagcagtgcacgaacaaatgcaaaattcaggttatgctcaaaattgttcagttacattggaacagacttacatttcaagaacaagcattggctgggtgcagtggctgacacctgtaatcccagcactttgggaggctgaggtgggcagattgcctgaggttgggagttcgagaccagcctggacaacatggcgaaaccctgtctctactaaaaatacaaaaattagccgggcgtggtgacgcatgcctgtaatcccagctactcaggaggctgaggcaggagaatctcttgaacctgggaagcagaggttgcgatgagccaagatcacgccattgcactccagcctgggcaacaaaagcaaaactccatctcaaaacaaacaaacaaacaaacaaaacaaaagaaaacaagctttggccaggtgcagtggctgacacctgtaatcccagcactttggcagggcaaggcagaaggatcgcttgaggccaggagttcaagaccagcctgggcaacatagtgagaccccatctctacaaaaaaattaaaagttagccaggcatggtggtgcgtgcctgtggtcccagctactcgggaggccaaagtggggggattgcttgaatctaggagttagaggctgcagtgagctatgattgtgccactgcaatccagcctgggtaacaaagagaccctgtccctttaaaaaaaaatccattgctggcaagcgcagggattcctcttgttgtggggtgggaatggaagaaggtcatttttaggtttgggattagcagcagacttgagggactgtttaaggcttcagatgaacaaggttttaaaggctattgttatttatagtttttatattagccatccatcagggatttggagaggggacaatttagaggattatttgtaacttaaaaataattatttatggttggtatattatgttgtagtttaattatctgtagttttaggatatctgggactggggaccagagaattatctttttatttcacctgattttgtttctgcatcatctgagttttgaaaattatccaaggtctggggagttatccctagctggggtttgagaaagggaaataataaaaaaaatttttttttggctagacgcagtggctcacccctgtaatcccatcaccttgggagtctgaggaaggaggatcggttgagcccaggagttccagattagcctgggcaacatagcgaaacctctacaaaaattagccaggctgggtgcaatggctcacgcctgtaatcccagcactttgggaggccaaggcgggcagatcacttgaggtcaggagtttgagcccagcctggccaacatggtgaaaccccatctgtactaaaaatacaaaaattatccgggcttggtggtgggcacctgtagtcccagctacttgggaggctgaggcaggagaattgcttgaatccaggaggcagaggttgcagtgagccgagatcgcaccactgcactccagcctgggcgacagagcgagactccatctcaaaaaaaaaaaaaaaaaaaaaaaaaaaaaaaaaattagcaacgcatggtggctgaacaccagagttttacaaatgagttttattttagagacattattattattattattgcaaagatattaccaagtttccttattctccacacccagctcatctgacttttgtaaatgatccagagtttgaagtttagggagggattttctggagggtggccttcctcggggttttcaggtatctggggtcagagattgagggttgatctgggctttggggagcaggggatcccctgggtcttgtcagttatctggagtctgaggaccattttggtgcggagtagccccgtgtgagatcgtacagtgcaggcaaggggtgggtgtgtcccgtctccctccccagcccgtggccaggccccttctttctgggtgtctgaggcacccctctcccgacagctggagaagccagatgcgggctccagacctgtgcccctcccccgggggggttcgcctcctctccttgggggctttatgtctttctctcccccacctgcaggtcccgagggctgtaacctgtttatctaccacctcccccaggagtttggagacacggagctgacgcagatgttcctacccttcggcaatatcatttcctccaaggtgtttatggatcgagctaccaaccagagcaagtgtttcggtgagtggccgccgacgccacccctccccatccacctccctcgcctgccccctgacagggaatgggagggttttggtcggcctcgggacagggctgtgctgaaataatcacaatcagaaccagcctgtggccgggcacagtggatcacgcctgtgatcccagcactttgtttgttttggtttgggtttcttttttttttttttttttgagacagagtctcgctctgtcgcccaggctggagtgcagtggtgcaatctcggctcactgcaagctctgcgtcccgggttcacgccattctcctgcctcagcctcctaagtagctgggactacaggcgcccgccaccacacccagctaattttttttttttttttaagtagagacggggtttcacagtgttagccaggaaggtctccatctcctgacctcgtgatctgcccgcctcggcctcccaaagtgctgggattacaggcatgatccactgcgcctggccaatcccagcactttgagaggctgaggtgggcggattgcttgagtccaggagttcaagaccagcctgggtaacataatgagaccccgtgtttacaaaagacaacctttttaattagctgagcttagtggcgtgtgcctgtagtcccaactactcaggaggctgaggtgtgaggaccccttgaacccaggagttcaagaccagcctgggcaacatagcaagaccccatttctacaaaaaatacaaaaaaaaaattagccaggcttggtggtgcacactggtagtctcagctacttgggagatggaggtgggacgatcccttgagtccgtgaggtcgaggctgcagtgagctatgatcacaccactgcattccagcccagacaacacagcaagaccctgtctcatacaaaaaaacaaaaatggccaggcgcagtggctcacacctgtagtcccagacctttgggaggctgaggtgggtggttcacgaggtcagaagatcgagacatcctggctaacacagtgaaacccccatctctactaaaaatacaaaaaaattagccgggcatggtggtgggtgcctgtaatcccagctacttaggagattgcagcaggagaatcactagaacccaggaggtggaggtggaggttgcagtgagccgagatcgtgccattgtactccagcctgggcaataaagcaagactccgactcaaaaaaaaaaaaaaaaaagaactgaggcctgaatgaggagcaccaggcatgggaaatctgggggaagagtgtcccaggcagagggaacagcccatgcaaagaccccgaggcaggacggcgcctgacatgttggaggagcagtgaggaggcccatgtggctggagcagagtgaggagggggagagagggaggagggggaacatggagaggggacaggggagggtgaccagggccttgtgagcctcagggaggacttccttgtacccaaagacagaggacattaaggctctgaaaagggctgcaatttgtccaaagtcacacagcaggaaagaggtagaagaacctggagtagaaccagactctttttttttgttttgttttttggctttttttgaggcagagcttcactcttgttgcccaggctggagtgcaattgcacgatctcagctcaccgcaatctctgcctcttgggttcaagtgattctcctgactcagcatcccgagtagctgggattacaggcacccgccatcacgtctggctaatttttgtatttttagtagaaatggggtttcaccatgttggccaggctggtcccaaactcccgacctcaggtgatccacccgcctcggcctcccaaagtgctggaattacagacgtgaaccaccacacccggccaaagaccagactgttaacctcacactgtcctgtttaaagggtcagcccttgactttgtttttttttttttttttgaaatggagtcttgtgccatcagtgcgatctcggctcactgcaagctccatctcccaggctcaagcgattctcctgcctcagcctcctgagtagctgggattacgggtggacactaccatgcgtagctaatttttgtatttttagtagagacggggtttgaccatgttggccaggctggtctcaaactcctgacctcaggtgatctgcccgtcttggcctcccaaggtgctgggattacaggcgtgagccaccacgcctggccatggggtggagtatttctgatggcctctggacagagactggagcagaggtactgacagagatggagagaaagagacagagatgagacagaaggagagggagaggaagaaaagactcaagctagagaacgagagaaagaggggaggggagagaaacagagacagttagctgggcatggtggtatgggcctgtggtcccagctactcaggaggctgaggcaggagcatctcttgagccaaggaggtcgaggctgcagtgagctgagattgcgccactgcactccagcctgggtgacagagtgagatcctgtccccactcccttctgcaaaaaaaagagagagacaaagttgtggacacacagtcagctggagacacagatcctggctggacagagggcttggaaggaggcaggcatcctcctgagggaaggtggggaaaaggtggccctccaggaccctcggaagccccacctggcccctataccagctgggaagtctcagcacagccgaccccaagataaggagtgagtgccccatcctcagaggtatacaagtccagaggtgtcagaacaaagccagggctgctgtgtgtcctccaccacaaacaccctggcctgtgcaggtgtgcacgcaggcctgctcaggaccccgtgagccgggaagccagggccacagcataggaacaagccgaggacacccgcagcgccaaccacggaggtccaccctggtttctgcaggcttcgtgagctttgataacccggccagcgcccaggcagccatccaggccatgaacggcttccagatcggcatgaagaggctcaaagtccagctgaagcggcccaaagacccgggacacccctactgaccgcgcccacagccgccctgaggctgtaggcatggcccaggtgagccgccaggcggccccacccccgcccaagccccccgtcttgtctgaaaccccctcccgcggcccacttcatgctccaaaccctccccaggtggggtgatgcttcaagaggctacaagaaacctccgggttgggttggcggggacagagctggatgtagacacccccgatccccctgtggttggggctggagcagagggtgggaatggggtagggactgaggtgagccagggcccagtgaggtcggttagggaatccttcccggagaaggctttgagggctgaatagaagttcacctgagaggccaggtttgctctgggggtgggggtgcggtggggagggggttctgtcctgtcctatgagtctgttttccctgctgaaaacccaacaccagacggaaatgccaagtgcccaccccagaccccaaaccctaaggttggaccccaactcggaaccaggagtggagcgtggaaggtggggacagtgctcagggcccagtccagttggcactgacagcttccagtgtccccgctccatttccactagttcccctgggacaagcggcccctcactgggtgtcattcctacccaatgagttgatggaaaagtgggattcgtgccccacccaccatcatgcaagaaaaacaagcaaaacgaaacccagactgtagtttgccatcagggcaaaccactttctcaacatttttttgtggggggatgaacagtaaaccttgtggggccactgtggaaacttaaccgtgggtctcaaaccttgatgagcctcatctgtaaaatgggttcaagaaagtcatctccccagagacggcggaaacggtccacctagggaacagagtggggcatcttttcgcagccgagcccagaacccatcacctaaagagttctggatgattcgttttgattttttttttttttaaatcaccatcgctgtcgtcatcagagtctcgcctagggcctggcacagagtagacgctcagttagaagctgtctggccttttcaccttctcccgggtcagcacacacagatttgggagtatttacctgcacagaacgcaccttcaggaactgccaaccagaagcaaaatccaaagctgctctctgcgatcccttcacttttaactctcagtctgcactttttttttttaactgagcatctattatgtgctaggcactgttccagtgctcggggacgcagctgtgaatgaacagaaacgggggatggaggacaggggagaaacccccttcacgggccttagatggcagggggtagggaaggagagacagaaaataaacagaaatatctgtccccagctgccagaggaggaggaaatgggcttggtgatggtgacattaagttctttgaaagctgggtttgttggcctctgaactctggcctttgtgggatctgttcttttggaaaagatgggagcccctgtgttcctagatcccagcctggccgggtggagtagggtggggaggtggtgtccacctgtgtggccccgttctcactccctaacgcccgtcccttctcccccaggtgaggggccttcccatcccaggagggttttctgcttccaaccgatccaggacttacccataaattccaaccgttctttggacaccagccctttcctcccctcttctccccttgccctgcccctctactggaggccacctggagtggcgaggggcctttggggtctgtcctggggcaggggcgggggtgggggaggctcctgaatcgtgggcagaagtgttcacacgccccccctgctttgggaaacgctctcgcttcttccccacaaaacttggtgacttccccaaactaaatcacaccttttcctatatatatatatatgcatatatatatagatctatagacagtatatatatattttgagtacggatcatgggaccaaacttttccgacttccttccatccgagtagagtgaccctgggccggtcactcagcgggggacacaggaagggctgaggttggcgggaccccgcgcaacacataccaggtgccccacccccacccccaccacctcctggctggcacatcccaccaggaacccgccaacacaacatacctccaggacttttggcaccccccaccaccaattctccagggccgttgggctctgccagcttcagtgtccctggtcccagctgcagcctccagaccccacctcgccccttcgtcccagagccctgccctccgggatggatataggtacaacagagacgctctggcctgcctcagcccttctctgctcccctgcccgagtcatagccttactcatgtgaccaatagcccttagctttccgtcggagggggggggcggacagggttggggggagcccccctgcccctcaccaccccctcccaaggccaggcagccattgtccctgccttcgaatcaccagcctcgaatttaaggtcttgtaaccaggattgccaagcgtagcggaagaccctacccggaccggccaagcacccctttaactggagacgaacttgataatgaccttcatacctctacagagatttttttttttttccggtctttctgagcaggtacaaagaagaaaagagaagaaaaagatggggggaaaaaatcaaaccacaatggatttttgtttcctagttgggagtggggtggggtggggtgtctttgtgagggtgcctctgtacagctgcccaatccgcgacacccacgtcaaagcacagcatcaagttcgtttggacatccggcaaggcctcttaccaaatgaggcgccagataacttaataagctcaaaagaaaaaaacatttaaaaagaaagaaaaaaaaaaaaaaaaaaaccaagcatttccttttctttctaccaaaatgtgttgactgacccggagggggggcggtagggtgggggaaaccacacagaaaaaaaaaaaaaaaaaaaaaagaaaagaaaaaagaaaaaaaaatagaaaagaaaaaaaaaaatcttctgaaccaacttgtttcgatattccagagtttgataattgtttcgagactctcctctagcgtgcctgtgttccgtgtgtccccgtgtgcaagcgtgtgccatgccaatctgcctcgagggggcctcacccgtgtccgcggcgcccgccgaggcccccgagggcctgcttgggagtgtgtgccggtgtgcagttgtacgtgtctttctggtccatgtttactggctgtaaataccatttttatactccacatcgcagacctgcgtgatttgtacaatgtactttatttctgctacgagtaatttcatgaagtttcaacttgcaaactgacttttgggacaaaccaacacacacacagaagagaaagcaaagaacttggaactttgggttgactcggtttgagttttgtgtcaaagaagatttcccgcggctgaagaggttggtgttcctgttacgtgtttcaggtgagaagcagcaaagcgtcttaatgttcaaaacgcctctctttggtctggagaaaaaaaaaaaaaaaaaaaaacaactaaaaatttatttaataaaagttttacttgctaaagggctgactcttctctttctttcctctctctgtcatccacacagaccaagtgtatctggccccatccagcacctgggctggagagaaatgcaggtttagggtgaggggttgaaggaggggatattcagagaaaccaaatgtagatatagataccaggggccaggcgtggtggctcaaacctgtaatcctagcactttgggaggccgaggcaggtggatcgcctgaggttgagagttcgagaccagcctggccaacatggtgaaaccccacctctactaaaaatacaaaaaaaaaaaataacaaaaaaattagccaggcttggtggcacacacctgtaatcccagctactcgggaggctgatgtatgagaatcacttgaacccaggagttagagtttgcagtgagctgacatcgcatccctgcactccagcctgggtgacagagtgagactctgtctcaaaaaaaaaaaaaaaaaaaagttaccagctctaatgatcgggtatctgggatctgtctgctgaagccagatgcatttcttgatcatattacagctgtttgtttgtttgtttgtttgagatggagtcttgctctgtcgcccaggctggagtgcagtggcatgatctcagctcactgcagccttaacctcctgggctcaagcaattctcctgtctcagcctgagtagctgggactacaggcacataccaccacagccggctaatttttatattttttgtagagatggagtctcactatggtgcccaagctggtctcgaacttctgggctcaagtgatctggcctctgcctcccaaagcactggaattacagatgtgaaccgccgcccacagccagcagttgtttaactaagatcgctctggtctctgtcctcatggagatagtccagtggggcagagagatactatagaataaactatacaattttgaaaaaatgcaggtaaagttcacataacagaatttaccattttatttattgttttgttttgtttaaacagggtctcactctgttgcccgggctggagtgcagtggtacgatcttggctaactgcaatctccacctcctgggttcaaacgattctcctacatcagcctcccgagtagctgggattacaggtgagcgccaccacacctggctaatttttgtatttttagtagacatggggtttcgccatgttggccaggctggtcttgaactcctggcctcaagtgatccacccacctcggcctcccaaagtgctgaggttacaggcttgagccactgtgcccagccagcatttaccattttacccatttaaaagtgtgcacttcagtggtttgtagtgcattcacggtgtgttgccactaccacctctaattccagaacagcctatcaccccaaaagacatcctgtccccatcagccatcactccctacccccttccccaccccccagcacccacgcatccccttcctgtctctgtgggtccacctgtcctggacatttcatagaaatgggatcacacggctgggtgtggtacctcacgcctgtaacctcagcactttgggaggctgaggcgggtggatcacctgaggtcaggagttcaagaccagcctgaccaacatggagaaatcccgcctctactaaaaatataaaattagccgggcgtggtggtgcatgcctgtaatgtcagctacttgggaggctgaggcaggagaatcacttgaacctgggaggtggcggttgcagtgagccgagatcatgccattgcactccagcctgggcaagaagagcgaaactgtgtaactccatctcaaaaagaaagaaagagagaaagaaagaaatagagagagaaggaaggaaggaaaggaaggaaaggaaaggaaaggaaagaaagaaagagagagaaggaaggaaggaaaggaaggaaaggaaaggaagaaaggaaagaaagaaatagaaggaaggaaggaaaggaagaaaggaaagaaagagaaagaagaaagagagaaaaagaaaggaaagaaagaggaagaaagaaggaaagaaaaagaaaagaaagagaaataagaaagaaagatgggctcacacactgcgtggcctttcgtgtctggcttctctcactgagcacgaggtcctcacagttcatccacgctgtggcctgggtcagaggctccttccttttcatggctaagtaatattccagtgtgtggatggaccatgctgtcctgatccatccttcagtagatacctgggttgcctccatgtcttggctattatgagcctgctgctctgagcttcatggacaggtccctgcatggatgtgtgtgtttttagttctcctgggtagacacttaggcgtggaattcctgggtcaaatggtggctccatgtttgacctttgtgagaaattgccaaataattcttcctcctcttcttcctcctcctcttcttcttcttcttcttcttcttcttcttcttcttcttcttcttcttcttcttcttcttctttcttcttcttcttcttcctcttcctcttctttttcttcttcttcttcttcttctttctcctcctccttctccttctccttctccttccccttcccttccccttctccttctccttttcttcttctttcttcttcctcttcttttttttgagatggagtcttgctctgtcgcccaggcttgagtccaggggcacaatctcagctcatggcaacctccgcctcccgggttcaagcgattctcctgcctcagcctcccgagtagctgggattacacgcacacgccaccacacccagctaatttttgtatttagtagagactgggttttgccatgttggccaggctggtcttgaactcctgacctcaggtgatctgcccaccttggcctcccaaattgctgggattacaggtgtgagccaccacgcccagccgccgaactgtttttcacagcggcattttcaccattttacattcccacgcactgttcatgagggttccgattggtccacaccttcacccacagttgctacacaatagattgattgattgattgattgattgattgattagagacagggtcttgctctactgcccaggctggagtgcagtggcacaatcatagctctctgcagtctcgaactcctagggcttaagtgatctccctgcctcagtctcccgagtagctgggactacaggcatgcgccaccatcctccacaaaattttttacattttttttgtaaagacggggtcttgctgtgttgcatgttgaaccaggctgggcaccgaagctcatgcgtgtaatctcagccctttgggaggctgaggcgggaggattgcctgaacccaggagtttaagaccatatgggcaacaaagagagaccctgtctctacaaaaaaaaatcaaacagactgggcgcagtggctcacgcctgtaatcccgcagtttgggaggctgaggtgggcagatcatgaggtaaggagtttgagaccagcctggccaacatgatgaaaccctgtctctactaaaaaaatacaaaaattagctgggcattgtgtcaggagcctgtaatcccagctacctgggaggccgaggcaggaaaatcgtttgaacccgggaggcggaggttgcagtgagccgagattgcatcatagcactccagcctgggccacagggcaaggctccaactcgaaaaaaaaaaaaaatcaaacaattagccaggtgtggtggtgcatgcctatggtcccagcttttcagaaggttgagacatgaggatcgcttgagcccaggaggtcaaggctgcagtgagctatgatcacgccactgcactccagcctgggcaacagagcaagatcctgtcaaaaaaaaaaaaaaaaaaaaagaatgttcaatcatataacactggtttaagcattttatgttttattttttgggtttttttttttttttttttttgagatggagtctcgctctgtcacccaggctggagtgcagtgacgtgatctcagctcactgcaagctccgtttcccaggttcacgccattctcctgcctcagcctcccgagtagctgggactacaggtgcccacgaccatgcccggctaatttttttgtatttttagtagagatggggtttcaccatgttggccaggatggtctccatctcctgacctcgtgatccactcgccttggcctcccaaagtgctgggattatgggcgtgagccaccgcacccggcaggggtttttttctgtttttttttttttttttttttttttttttttttttttttttaagacagagtctcgctctgtcacccaggctagagtgcagtgacacaatcttggctcactgcaacctccaactccctgcaacctctgcctcccgggttcaagcaaccctcctgcctcagcctcctgagtagctggaattacaggcgcctgccactgcacccagctaatttttgtatttttagtagagacggggtttcatcatgttggctaggctagtctcaaactcctgacctcagatgatccattggccttggtgtctcaaagtgctgggattacaggcatgagccaccacactcagcctggtttaagcattttatatgactcaactcatttaacccgccccaactccctgaggtatgttctgttaatagtatccccactttacaagttaattaaagcccagaaaggttaagggacctgcctgaggctgcacagcagtacttgaaccctggctctctggcattctcttagctgctgtgtagtggcccaaaatcaaatgtattagattagaattcaggttattgtttgaaataggccaatttaagcttttaaaatttaacccaatgttgttaaacatttagaatgtgcacccttaaaaatacaccaattctgggcacagtggctcacgcctgtaatcccagcactttgggaggccaaggcaggcagatcacttgaggtcaggaggttcgagaccagtctggccaaacatggtgaaaccccatctctattaaaaatataaaaattagctgggcacggtggctcacacctgtaatcccagcactttgggaggctgacacgggtggatcatgaggtcaggagatcgcgaccatcctggctaacacggtgaaaccctgtctctaccaaaaatacaaaaattggccgggcgtggtggcaggtgactgtagtcccagctactcgggaggctgaggcaggagaatggcgtgaacctgggaggcggagcttgcagtgagctgagatcatgccactgcacttcagcctgggtgacacagcaagactccatctcaaaaaataaataaataagtaagccaggcatggtggtgggcacctgtaatcccagctacttgggaggctgaggcaggagaatctcttgcacctgtgaggtggagtttgcattgagccaagattgtgccattgcactccagcctggacaacagagcaagactccatctcaaataaataaataaatattaaaaaataaaaataaaatacaccaattccgccactgagtgtctccttaagaatgagcaaggatgtgcttaggacagaggaacactagctatgctataagtgctcatctgaggcataggctaagtgacatgcagggtgcattagttaggtgttgctgcataacaatttacccatcccccagtctgtcagcttaaaacatacattattatctgacctacaccatttctgttgatcaggagtccaggactgatttagctgggtggttctggctcagggtctcatgagattgcaaactgtcagcagccaagtctgtcacatctgaaggttcgactggggctggaggagccactcctactctggctccctcatgtggctgttggtgggaggcctcagctctttgccacgtgtgaatctccatagtgctacttgagcatccttacaacatggtggctggtttttcctggagtgtgatccaaaagagagagacagagagagagagactgcactgactttttgtttgtttgttttgagacagggtctcgctctgttgcccaggctgaagtgcagtggcaccatcctagctcagtccagtcttgaaatcctgggctcaagagatccctctgagtagctgggtctacaaatgtgtgcgtcaccatgcccagtttattattttactttttggagtggcggggtctcactctattgcccaggctggtctcgaactcctgggctcaagcaagcctccccgctgggcctcccaaagtgctgggattacaggcgtgagccactgtgcccactgcaaacatttactcttcacaactctggtagcttccttttccccagagcatgctacagccacacagtaaagccttacgtctattgagcacctgctatgtgcagcttgtgatcaactctttttgtcctcaccacaaccaaccaacaacgtaggtttctattataattctcactttgccgatgagaaaacggaggggcaggtttgtggagaggaaaacccaaggccacacagttggtatgtggtggagccaggatttgaaactgcgacccgttaactcctgcctcggttcccctcccttctcattcactgcagggatcacagttataaccccctgcttatgtatgcgctggcttgtttgatgtctgtctacccaacataacctggcgggtttcatgacaggatggtatgagtgcacagtaagtgtgtttggctttgttttaatgttatggggttttttttttttaattatttacttattttgaaagagagtctcactctgtcacccaggctggagtgcagtggtgcggtatcagttcactgccacctccacctgttgggttcaagcaattctgctgcctaagcctcccgagtagctgaaaatacaggcatgggtcaccatgcccagctaatttttgtgtgtgtatgtgtgtgtgtgtgtgtgtgtgtgtgtgtgtgtgtgtatttttagtagagatggagtttccccatgttggccagattggtctcgaacccctgacctcagctgatccacccgcctcagcctcccaaatgctggaattacaggcttgagccgccacgcccagcctgtttttatgttgagacagggtctccctctgtcactcaggctggaatgcagtggcacaatcatagctcactgaagtctccaactccggggctcaagcaatcttcctgcttcagcctcccaagtacctgggactacagatgcataccatcacacctggctaatttttttcagtattttttgtagagacggggactagttatgttgcccaggctggtctcaaactcctgggctcaagcgatcctcctgccttggcctcccaaagtgctgggattacaggcatgagcccttacacctggctgaattttgtttttctgttccctgttgcctagcacatgatacctgcttaccattaataaatgcactaaaaacacaatggttgagtttagaaccagactgtcccaggtttgaaaccggtttataacattgaatggctgtgtgtccttgagccagcagctgaatcctctggggaccagtttttctctctctctctggaaaacgaggccaatccagctcacaaagcgttaatatgtataaagtccttcctggcccggagaaagcactgcagaagctttaaaataaatcagcccttaaaaattcactttccggctgggtgcggtggctcacgcctgtaatcccagcactttgggaggccaaagcgggcggatcacttgagatcaggagttcgagaccagcctggacaaaatggcaacccccccctccaactctactaaaaatgcaaaaattagccgggtgtggtggtgcgcacctgtaatctcagctactcgagaggctgaggcaggagaatcgcttgaacccgggaggcggcggttgcagtgagccgagttcccgccactgcactccagcttgggcgacagaatgagacttttttttaaaattactttccggatgctttcgctccagcgaccagcagggggcagcaaaaacccatgccttctttcaggctctgtgccttggcttgaaatgtgcaagatttattgagctcggagggagactgtgaggggactccctggcttctctcctgggacgcaaaagttgccccgtgcaaactttctagcctgcaaggtcggccccgctcctcctccccttttctctccagtaactgaatgtggtttggctgccaggcctttgcacgtgcggtttccctagcctggaacactctgttcccaccctggaggtcggagatgctgggttgggatggagacacccgtgacctgctaggcccagggcatggcgttagcaaaggtgggggtagaagtaggaattactggccgggcgcggtggctcacgcctgtaatcccagcacttcgggaggccgaggtgagtggatcacctgaggacgggagttcgagactagccagaccaacatggagaaaccccgtctctactgaaaatacaaaattagtcgggtgtggtggtgcatgcctgtaatcccagctactaaggaggctgaggccggagaatcgcttgaacctgggaggcggaggttgcggtgagccgagattgcgccactgcactccagcctgggcgacaagagtgaaacgccgtctaaaaaaaaaaaaaaaaaaaaaaaaaaaaagtaggaattacctaggtccgagttagaaaacagagagcccctcaactgtggcctcgaaaccacacagaggactgaagcaggatgtgtgggggtaaaactgagggccaaataggagctgagtcccgaccaagggagctggagttcctcacctctgggtcctcaatatttgctgattgacttaagacatgcatgcccttaagccttgcattctctctccaagcttcagtttcctcatctgtaagacggggctcatgagatatatatatatatatgtgtgtgtgtgtgtgtgtgtgtatatatatatatacacatacatatgtgtgtatatacatataatgtatatgtgtgtatatatgtatatatacgtgtgtatgtgtgtgtgtgtgtgtatacacataatttttggttggttgtttgagacggagtctcactctgtcacccaggctggagtgcagtggcgcgatctcagttcactgcaacctccgcctcccaggttcaagagattctgctgcctcagcctcccgagtagctgggattacaggtgcgcgccaccacacccggctaatttttgtatttttaatagagacagggtttcaccatattggtcaggctggtctcgaatccctgacctcttgatccgcccgcctcggccttcctgatccaaccgcctcggcctcccaaagtgctgggattacaggcgtgagccaccacgcccggcctgggctcaggttattatgcaaacatccagaactgggcagatcaagatgaatgataccaatgatactatcacattataggcaaaataggaccttctccccggtcagaaaagtgaactctcaggcatcactcctactggaatccagagtcaataaacatttatgaagcacctactgggtactaggagctgttgtagaaaggtactggggagaaggcagggaacgaaatgtacaaaaattctgaccacgtccatagtccctggccccgccccactacttgccccaaccctcacaggaacagtttccagccccgcccccagccccgcctcctctccaccccctcacttttctgaacctaccagagcgaggtgaagggtgagagtaatctacatattcatgagggatcagccaatccacagcctgaactcggatttgtcttcagagcctagctgattgtgacgtcaagagtgatgcattacgtagccgggcgccgtggctcatgcctgtaatcccagcactttgggaagccgcggagggcagatcacccgaggtcaggagttcaagatcagcctggccaatatggtgaaaccccgtctctactaaaaatacaaaaattagccgggtgtggtggcgagtgcctgtaatcccaactactcaggaggctgaggcaggaggatcgcttgaatccagaaggcggaggtggcagtgagtggagatcgtgccactgcactccagcctgggccacagagccagactccgtctcaaaaaaaataataataataataaagtgatgcattgcgtgatttttaaaggtgcagcaacctctcatggtctcagtttgcatatccgtaaagtacaggttggggcgtgcgggacatagaaaccagcgcagtacgatgacgctgaaatcgctttgccaccttgggtgaaattcagggatacgttttgagcgttcactacatgtcagacactttactccagcgggggctccggagttcctgcttagaatgggagcttcagcaccgggggtcgcggacagctcccggctctggtcgcaggggctcccatgcaggatgactggggacaagggtctgagctttctctgcctgtctgtcctccatcaaagcctcaaatgaactcagccctaatctctgacagctaaggggttgctagtcaggacaacactctgtccttggtccccaatcctgctcctccctcgtcgtctgcatctcagctgatggcagttccattctttttttttttttttttgagacggagtctcgctctgtcgcccaggctagagtgcagtggcgcgatctcggctcactgcaagctccgcctcccgggttcacaccattctcctgcctcagcctcccgagtagctgggactacaggtgcctgccaccacgcctggctaattttttgtatttttagtagagacggggtttcaccgtgttagccaggatggtctcgatctcctgacctcgtgatccgcctgcctcggccgcccaaagtgctgggattataggcgtgagccaccgcgcccggcccggcagttccattcttccgggtgctggagccgaatatcaacgctatcctggatcttttgtttcttgctcaactccaatctatcagcaggtcctgtcgcccctgccctcactattccatcctcaaacgctcacttcttcctgttcctctgcctgggtccagccccatcgttgcccacctggacctggcgcagttgcctctgccttggtcctaggctccaccctctgccacacagtctgtcctccctgcagcagccaccagaggggggctgtgagcacccgagttagggcctgtccctcctctgcctacagcactccaaggctcccaccttcctctgggtcaaagcctccctgtgacctataaggctggcaagaccttccctgtgttagccaggatggtctcgatctcctaacctcgtgatctgcctgcctcagcctcccaaagtgctgggattacaggcgtgagccaccacgcccagccaattttctgcattttgaatatatgtctgggtatgtctcttagaggatatttattctgtttggtgttttctgagcctcatggatctgtgaaaattattggctattctctgaaaacaatcagctgccctagtcttccttctcctgtgggattccaattacacctgtgttagatcacttgctcttcacctgcagctcttggatgctcttaacctgtctttaacacctctctaattcttgcttttctttttttacaaacagagcaggcttcaggcttgatgtttggttagactatgataaggttgaggaggtttttgttgcatttatctttggacctgccctcaattcacggcagactgtagtgcgggggaggcgttattcttttctctttaaatatatctaagtcttttaaaacaaacagtttgatccaaagaaaaatcttcactaatacttggacacagataaaacgagaagggtggtctgtgagtgacagcattgagaggctgccctaatctggcttgttggtttttcagctagggaaactgaggcatggagtgggtaaagacttgtagaccaggccgggtgtggtggctcacacctgtaatcccagcactctgggaggccgaggcaagtggatcacctgaggtcaggagtttgagaccagcctggccaacatggcgaaaccccatctctactgaaaatacaaaattagccgggcgtggcagcaggtgcctgtaatcccagctacttgggaggctgaggcaggagaattgtttgaacctgggaggtggagggtgcggtgagctgagatcgcaccattgcactccagcctaggcatcaagagtgaaactccatctaaaaaacaaaaaaagacgtgtagacctgggccttctgtccttggtacggggggacaggaaccggggttgggggtgtggtgcagatggaggatcctcacgaagatccaggtgctggcccagcgcagcagctgctgcagttttgatcactgggctgaccctcttgggcctcagttctcagagtggaaaatgtggctggtcaatcgggtgtctctggtgggggcataggctgtgctacacagtggacggtccacagcccaccccgttgactgtgcacggctgggtggcttgtctttcccatctgtctttctcactgtctctctctctccctaactctctccctctctgtctcattatctctgtatctctgtctttctctatcactgtttccctctaaatcttgctgtctctccttgtctctgtatctttgtctctgtctctctcccctctatctctctctttcactctttctgcatgtctttgtgtgtctctgtctttccctgcctctctgttcatgtctgtttctctgcctctcatctctgtctttttccgtgatgtctctctgtttctttctcttcctccctctctctccctttctgtctcttctctctatccctctctctctcttcctccctctctccctttctccctctccctctttccttcttccccctccctccctccatccctctctccctccctccatctctctctcctcccttctctctctccctccctccatccctctctccctccctccatctctctctctccctccctccctccctgtctccatgtctcttcctctctctccatctctcattctctctccccttctccctccctcctttcatctctctctccccttccctccctccctctctctccccctccctctctttatctctctctccctctctccatctccctctctttctctctccctccctccctccatctctctctccctctttccatctctctctccatctctgtctcatctctctccatctctccatctctccatttctccatctatctctccatctctctatctccatctctctcttcatctctctctccatctctctatctgcctctgcatctctccatctatctccatctctctcttcttctctctctccatctctccatctctctctccatctctccatctctctatctccgtctctgtcttcatctctccatctctctccatctctgtcaatctctctctccatctctctccatctctctctcattctctttcccccttctccctccctcctttcatctctctctccccttccctccctccctctctcttcccctccctccctttatctctctctccctctctccatctctctgtctctcattctgtctccctccctccctccatctctccctccctccctctctccctccctctctccatctctccttccctctctccctccctctctccatctctctctccctctttccatctctctttccatctctctctctccatttctccatctctctctccatcactctctctccatttctccatctctctctccatcactctctcattctctctcccccttctccctccctcctttcatctctctctccccttccctccctccctctctccccctccctccctttatctctgtctctccctctctgtcattctctctccctccctctctccatctctctctctccctctctccatctctctctccatctctccatctctccctctatctccctgtctccatctctccatctccctctccatatctctctctctctctctctctctctctctctctctctctctctccctctctccatctctctctccatctctccatctctccctctatctccctgtctccatctctccatctccctctccatatctctctctctctctctctctctctctctctctctctctctctctcccttcccgtttgaaggttgcctcccacatctgccttccgccaaggcccgggctctgacccgccgtctgaatgcctgactccaaccgcacatctgtggggtaattgtctcctacgaccacaaggtactgaggcaaattatagttacggggcgggggcctccatgtgggcgaactgcgtccgctgggccgggctctgccggcctcagctgggcaggatgaccgaggcatggccccactagggtcaggaaagctcacgcccagcccttcccctcgcccctccccacacaccagccagtcctttgccaggcctccatctttagtgccaggatgaaaatgccttttgcaaaaatcagcaggaaactccaatatttgcaaaaccctgactttctattcatgcatacattcctgcattcaacagatctgttacggagcgcctactctgagccaggcactgttccaggcactgaggccaaagcagtgaatgagaccaacacaattctcggccctcctgaaatcaacaccccactgggggagacaggcaagaaatagggaatagtcatcagtgctttgaagaaaaagcaggaaagtgatcttgggggcccaggggagttattttattttattttattttatttattttattttatttatttgagacggagtctcactctgtcgctaggctggagtgcaatggcgcgatctcgggtccctgcaacctccgcctcctgggttcaagtgattctcctgcctcagcctcctgagtagctgggattacagatgcatgccaccacacccagccaagttttgtattattagtagacacgggtttcaccatattggccaggttggtctctgtctcttgacctcgtgatccgcctgtcttggcctcccaaagtactgggattacaggcttgagttaccacgcccagctattttattttatttttattttgagacagagtctcgctctgtcacccagggtggagtgcagtggcacgatcttggctcactgcaacctctgcctcctggattcaaacaatcctcctgcctcagcctcccgactagctgggattacaggcgtgcaccaccacgtccggctaatttttgtatttttagtagagatggggttttgccatgttggccaggctggtctcgaactcctggcctcaaaggacccacccgcctcggcctcccaaagtgctgggattacaggtgtgagccactgcacccggccaagccattgctattaatatcgatgattcaaatgatagggtctctcccatacacctgccctgtcaagcatcataggtgcttactgtgtgcacagctgagtcccaggggatgccggggtcccggtgagggttcagacccgggccctgccctccaggagccccccaggctgggggaggctgtactggatgcagacaatctcaatcccttggggttaaggctgggtcttgtgggaaccttcctatcgagcagaatgtggctgctaatccaggcttttcagggtggaaactcagagcctgtggtccagacagtgggcgtggcgtggctgggtgtctcgccttcctctctctgtctctctccaaccttctccccatctctgtccctccatttgtctctgtgtctgtttgcctttgtctctgtcctcaagggttggggcaatgtctgggctgggttttgacagatgcataggagttgctcagcggtgcaaagaggaaaggcatcccaggcagaagcaaaggcccggagctgtagaagaacgtggtgtcatcaggaagtgggacggtgacatgcattagtgagagaagggggatgagtgggaagccgggtccagtcgccgtcgggttcttatgttggagaccatgaagggaggccaagagaggagggaaccagccacagctgcactttaggaagattcctccacggtgccggggactgagcagaggagacgagactggggtggccacgttccccagcacgccaccccgtcctcagccccaatgacacagcgaggcgcctggtccccattcatgtcctgcgccagctgctcagcctccacttccctccgagcactcggagaggacacagaaaagcagaggccagaggagttccgggtgggccctgtcattgccatgtcagagctaaggggcagtccctccccagggaagttcttcctgcagtctatctgcagtccctcctgctacctgcgggccaggacatccagcccccacatacacaccagtgaccagccccttctcgcctcacccgggcatacacttcatgctccataaatgcacagcgactgttacattatgaaacaaaaggaacccccccaccccctaccacccaaaccccccaacttgtctctgcttggaggccaggagaaggaaggagaagataaaatagtgacagtcacgccgggagcagtggctcgcgcctgtagtcccagcactttgggaggccgaggcgggcagatcacctgaggtcaggagtttgagaccagcctggccaacatggcaaaactccatctctactaaaaatacaaaaattagccaggtgtggtggccaggtgcctgtaatcccagctacccgggaggctgtggcaggagaattgcttgaacctgagaggcggaggttgcagtgagccgagattgcgccactgcactccagcctgggcaacaagagtgaaactctgtctcaaaaaaaaaaaaaaaagacttacccctccagggtcccatgaagacagccgagccctgcccggagctaacggaggccttggagcacgctcacaggggcaccctcccggctggcatctgggaagcggaggtgggtgggtgttgcgggggggggggtcggtgggggggggcgttccccctcccgccccaggctgccgggtcctgcgcatccgtctgtccctgatggaggtggtgggcaggcgggagaagccacgctccttccggggggcgggaggggggattttccaatcagagtttgagcttcattcacaaatccatggccccgtctgattgcaccaacggctgctgcacacacacacacacacacacacacacacacacacacacggcctgtgacagcctcgccgggctgtgggtggtcacttagttgagagtggcctggtgtgtctcacattaacgcatcccaagccctcctgcctctctctcttctctcttctctcctctctctctgtctctctttctctctctctctctctctctcactctctcgtctatgctctccagctcccagtgtccccggcaccctcctccgactccccagagaaaagctgcttgtgtgacggcatcatggaagccgggtgcccggacctgcctcccaggcggccggcccagcccgcactccggtccccataaggcgattcggggccgccctcgccgtccgccccagcatggaggtgcccgggccccccgtgtccagcaagccgggagagacctcggtcaaatggcaactgtgctacgacacgacggctaaaatgtggtggatggtgagtggagcggggcccgccgtggcccggggccgggggcaggagggggcggccggccgaggaggcttctccagccaggcgtggttggggggcggcggtgacccccccactggggagctgtgaagtcggggaaggtggtcagaggtggtgaaaccgagcccagatcatggagagcagaataattcttgcatcttccacctggagacgagtccgcggctgcccaggcaccgctaagggcccgaaagtgcctgtttctgtggcccacgagggcaccagggtggccgttcccttggacggttttgcagaggatcagtggtcctggagatgcttgtgctgggcccagggcctgtgatgggatgttctgagggtggggaggtctcagcgggctggggagcgtgaggcccagggactgggctgctgtgtgaccccggccaagccctcgcctgcctctgtgccctgtggtcccagaaaacggggtggacaccctcctcgctctggctggatgatggccaagggccgagggaaggtggggtggggctgtcgcctgctttggcccagaggaggactatggcatcacccctaagattgggcacccttccggaagcttccagtggtggtggtggggggtggttaaggccacgtcccttgaaactgggacccaccggatggggtaagaagcaattccggggcagctctgtgtgtaagacagggcacagttatggagcctggctgggggccagtgtccacggcccttggggtccgcgcgagaccgtcacactgtccgcctctcagtccgtcggtccatccagctgtctgggagctggccggtgatccatggggaacttgaaaacccgtcaacacaggtctgcatcatgcagatgtgtgtttcaacctgggcttactgtgtgaccttgggacagtggctcaccctctctggcccgcaggttctcccatcagggaaatgatgagcggcctagacttctcgggtttcatggcaggtgctctgtgggtcgccaaggaaagttgggcctcgaggtgggacatggcacctcatgacctgctgtgacctctcatagctgctgtctctggggtgtgtctgcttcaggtggggtcagagcctctggggtcatttccttagtctctgagcaccaaagtcttggggtttacaaggacagagagacctttcccacagccctggggagtgtcctgcattggtttcacttttcattcttcatacaaccaacatttgagtactcgctgtaccccaggccccatttctccatacgggggacacagcagtgacccagacaggaaaaaaaaagtccctgccttcttggggcaaatgtcccagagcgggagacagaggataaaaatatctgtgcacaaagtaggagtgaactacgattgtaggaggaagcagtgagaaggcgctgggggcctgagtgagcccaggcaatctgggagggctttcctgaggaggtgacatctgacctgagacctggtggatgacagaattcattcagataagagaaatgggaatagagttccaggcatgggtcgtggcatgtggaaaggccctggggcaggaccacatctggcctgttggaggaacagcgaggaggcctgtgtggctggaccagagtgaggagggggagaaagggaggaggagagggcagggaagggacggggcaggtcacgcagacctgatggcctctgggaggacttgggctgtgacaccgaggaaggtgggagccatggagggctgcgggcagaggagggacgggacctattttatatttttaaagcttccttgggcttctgtggggagaaagggtggctggggctgatgtggcagccagagaccaggggaggctgaggcggcttctaggcgagggatgatggggacttggaggtgcagggaagggagcaggtttcagatgaaaaaaggctgggacttggcaattaaactgaaggcccagagaagctgagtgatttgctcaaagtcacccagcaagtgaagaacagagctgggagtgggagaagggcctgaggtcagaggtcagaggtgggggaggtggggagcccttcctcatctccatctcctgggtccttagcgagccaagcagaactggcagtttgagaaaaggagaacatttcagtgcaaacttgaggtcttatcaatagaggtagaagccccagtataggggaggttatggacccactcattagtcaaggggaggtatcaaaccggagtatgtccagacagggaaagcggatagggcagccttcagggaaagactgagagactcagggctttagcccaagaaaagaagatgcctaggggtggaattcagttcagctctccaagctctccctgacatttctctggcattggctcagagctgggtcacctgcgccctcccacaggatcaaccacacattcagggggttcccaaacacaagagctgaagcagcaggacccaagattcaggactcaaaatctccctaggcggggcttccctagggcagaagaagctaaagagggcagagggcagagcctggcctctgcagggatcagcttgacctctgtaagtgctttctcctgagtgtgtgaaaggtaatgaggcatccgtcacaggaggcatgcaagcctctgttggtggaaattccattcttttttttttctttttgagatgaagtatcactctgttgcccaggctgtaatgcagtggcgcgatctcggcccactgcaacctccgcctcctgggttcaagcgattctcctgcctcagcctcccaagtagctgggattacaggcatgcaccaccatgcctggtgaatttttgtatttttagtagagacgaggtttcaccatgttgaccaggctggtcttgaactcctggcctcaggtgatctgcccccttggcctcccaaagtgccggtattgcaggcgtgagtcactgtacccagcctccattctttttttttttttttttttttttgagacggagttttgctcttttcatccaagctggagtgcaatggcacaatctcggctcaccgcaagctccgcctcccgggttcaagcaattctcctgcctcagcctcccaagtagctgggattacaggtgcacgccatcacgcccggctaattttttgtatttttagtagaaacagggtttcaccatgttagccagcacaccacaggctggtgtcgaactcctgacctggtgggctgagatgatcgcccacctcagcctcccaaagtactgggattacaggcgtgagtcactgcacccagccccagcctccattcttttaaatagagtggaccaggtgattttcaaaagatgcttttacactcagagcagccaggctcccaaggcgaatgaaggatccacgaaggattcaaaatgtggggctggatggagagagaggatactgggcgggcgttcaaccttagcctctaaatcccaaggcagagttaacatctcccagagctacaggaggcacagcacagggctcctgagacctttagggctcatggaaatatttccattttaatgtatcgtataactatgataataatgaatacatggttatgcatcccgtctggattctattcatctgtgtgcccatgcagccataaaagataaatttgtttgtttctttctgagacagagtctcgctctgtcacccaggctggagtgcagtggcacgatcttggcccactgtaatctctgtctcccaagttcaagcgattctcctgcctcagcctcccgagtagctgggattacgggcgcccgccaccacgcctgggtaaattttgtatttttagtagagatgggttctcgccatgttggccaggctggtcttgaactcctgacctcaggtgatccacccgcctcagtctcccaaagtgctgggattacaggcatgagccactgcacccagcccataaaagatcattttaaacaattctattttttgtgaaggaaagagcccacaaaaacaaaagttcccctggcctgggaaaatcataaggtagctaagttcatccatttatctgttcattcattccaagaacaagtcatggcagggcagtcgctcacaactttaatcctaacactttggaaggctgagatgggaggatcctttgagcccaggagttcaagaccagccggggcaacatgacgaaaccccatctctacaaaaaaatatgaaaattagtcaggcgtgatggtgcatgcatgtaatcccagctactcaggaggctgaggtgggaggatcgcctgaacccaggaggttgaggccatggtgagccatgattgtgccactgcactccagcctgggcaacggagtgaaaccctgtctctagaaacaaacagacaaacacacacacacacacacacacacacacagagaccaggcacggtggctcatgcctgtaatcctagcactttcagaggctgaggcaggtgaatcatgaggtcaggagttcaagaccagcctggccaacatggcgaaaccccgtcgctactaaaaatacaaaaattagccgggggtggtggtgggtgcctgtagtcccagctactcaggaggctgaggcaggagactcgcttgaacccaggaggcggaggttgcagtgagccgagatcccaccactgcactccagcctgggtgacagagcgaggctccatctcaaaaaagaagaaaaaaaaaaacagaaaaagaacaagtcacgtcagctctctgtgcctcagtttcctcatctgtaaagcaggcggaggtatgcacagcagagccccccttccccccagtagggtctttgtgggaaatccaatatgctgatgaccacggaggtatcttgcaaactgttaagggccctgcccaggtcaggaactgagtaatagtcacaaagataaagcgagagagattgtggttagattccagaaggacttccgtggtggctccacatgcgccatgagtgcctattacgagtccgcggtgaaccagagagacccagccctgcccttcctgggctcctggcccggcatggagaacagtaaaagagaaaatgaataatgcatgagataattttaaattgagaggaggacggtgaagaaattagaagaggcagccagtgggccgggaaggtgacgttgcggcctgagccatctcaagggacctaaagtcttggtgggggcagagggcatggcccgtgcaaaggccccgaggcaggactgggctggtgcgttagaggaatggccaggaggcccatgtggctggagcagagtgaggagggagagagagggagaaggggagggtagggaggggatgggcaggttgtgcagggcactgtggcctccggggtggatgtggtgtttgggaccagaaaccctagggagccatggagggttgtgggcagagagggcctcccccatccactgagtggttccctgtgcccatccgtgagtgccacccgccacctccccctctgtgtgcccggcgctggtggggggcctcgagatgcttcgtctccccagccccctggcccgcgcccgcccggccgccgcccactctgcccacatctgaggcgcctaggagccggacagtctgccgcaaaccacggaatgtttcccggagcgccgggccgggaatgtcggcggtgaggaggggaagggtggggagacccagagagatgggccggggcggtgggcaccgccacgcgagggacgcagaatcattgtcaccctcaaccccagagaggggccaccacgatgccgccgctttacagatggggaaactgaggcacggagtggcgaagcgactttctatgtccacagggcttgggagaggcagcgctgggattcgaacccagacttcctggccacagacctcaggggcttgcccactaacccacagcaaagaggtcagcgggaactcagtgaatgaataaatgaatgaatgaatgggttttgtaagtgagtgaatgaaggctcattcactccgcccagccaggcctcccaccccagccacagaccaagcagaacatgctgaaacacaccagcccccatcctccagttcccaccactcccactaccatctggaagtccctccttgtatccgacctaggtctttcctcactcttttcttctccagggcagataaatggcaaggcgttcacaccctcccctgcaagccgctgagtctgtccctccaggagaagggcagagcccagccactgctcaccctggaagtcactggggaagggacagttgaggctcagagaggggcagtactttccccaaggtcacacagcaaattcttgtaacgtcagagccctgaacgattcctgagatgacgcccaattagagtcatggccggctgagcctcccatgttgtatctccttcaatcctcccaacaagtcgatagggaaggaaccattattatcaccattttatagatggggaaactgaggcttggcaaggggcagccgctgcaggaggtggccgggaagcgaccagggtaatgtggccactctctggatcagctgagcagagggaccaacttgttactctgccacctgtgatgggggtgatatgaagccatggctgccaggggtcatatcacccaggtgtcgtgtgtctaccccagccacacgctaagtcctcatagctgcctggccacgtggtttcgcccacctttgcagctggtggctttgcaaggttccatgaaacccctagcagggcggaggcaccttgtcctttgatagaaacccactgggcagggagaagccactggctaggggctccctggagatggtgacatttgagccaggcccagagggatgctaaagctttcaacacaagaaggtagcagggagggcattcctggcagaaggaactgctcagacaaaggtgtggtggtgcgaatgtgcccccgtgtgacagagctaaaatggggcctgaggcgggggcaggtaagagagacatgtaaagccaggctgtgatgggtgggtctcaaatgcgaggctgcggaggtggggctttctctccagggtaatggggagccatgggaggtgtctgagcgaacaggaccagagggacagatgggagagaggatctaaggggagagtgagcagatgttgggatggacagactatggggagccaggaggagggagaagatggggctgatgccagagatccctacctcagggatggggagtgatggtggaattgtccctgacatggggacatggaaggaggagggggtttgaggaagacgctgagtctggagaccttgaggaaagtcctggaagaagctgaataagggagagagatcgctggagtctaagataatgactagaacatctgtgatcagtaactgcttgtgaattggatggagggagggagggaggagtcgataggtgggtgggttgatgggtggacagatggatgagtggatggctagatgaggggatagatgggtgggcaggtgggtgggtggatggatagatgagtagagtgatggatggatggatggatggatggatgggagggaggtggatggatggatggattgataagtggttggatggttggatggatggatgagtggatggatggatgagtggatgagtggatggatgagtggagagatgaatcaatggctggatggatggacggatggatggatgaatgggcaaacggatgggtaggtggatggttgcatggatgaatggatggatgaatgcatggatggatgggtgggtggatggatggatggatggatggatggatggatgggtggatgaatggaaggatggttgagtgtatggctgagtgagtgaatggatgagtggagagatgaatggatgggctgatggatggatgcaggcatgggtggatggacagacgaatgggcaaatggatgggtacatggatgcatggatgaacgaatgcatggatggatgggtggatggatggatgagtagagggatggatgggtggatgggtgaatggatgggaaggtggatggatagatggataaagggatgaagggagtggtggatagatggatggatggatggatggatgaatagagggaaggatgggtgaatggatgggaaggtggatggatagatggacaaagggatgaagggagtggtggacagatggatggatggatggatagagggatggatgggtggatgggtgaatggatgggaaggtggatagatagatggataaagggctgaagggagtggttgatagatggatggatggttggttggctgcatgtgtgggtggatcaatgggtaggtggagcctgaagacagaagtggctgccctgagtgtgaaggcaaaggcacagccctgggaagcccccacatcagggccaggaagaggagatttggggaggaagcaggaactgtgccagttgcccctgtaactgcctctctgtgaggcctccccacccaagtcctttcctctacccctcttccccagaaatggctttgggacttgaaatccccgccccccgccccacaccccaccacacacacacacatggctcagctctggggggcctaccgcagacaaatcagtggaaaattaaaatagtgcctgtgcactggtgatcggcggcttcagccgggcacttaatgatccctttctggggattgttaccagctggaggtggcgggggggtggggggtcttcaccagccacccaatctgagcagtagggggtggtccctgggagagggggtgcagcccacaaagccagaagttggcagtgatggcaaagctgggaagggcttaggcagggaaagggatgaccttgagctccggggatgaacccacttggacccctgcacccctgtggcccctgctgggacgtcctttctctctcagtttggctagatggctccagctcatcttgtagttctcaggtccaatgtcaccacctccaggaagccctcctggactaggtcaaatcccctcagaagtatctaaccatccttatctataatcctatttgcctggaggccttgagagcaaaacctcactttgccacattagctgtgtgtccttggggaagtcactttccccctctgtggcttgttttcctcatttgtaaaataaggctgttaggagaattttttttcttttttagagacaggatgtgactctgtcatccaggctggagtgcggtggcacgatcacagttcactgcagcctcaaattccctgggttcaagcgatcctcccacctcagcctcccaagtagctgagactacaagtgtatgccaccatgcttggctaattttttagtagagatgggaggtctcagtatgttgcccaggctggtctcgaactcctgacctcaagtgatcctcccgcctcggcctcccaaagggcggaattacaggcatgagccatctcgctgggcccctgttgggaggattaaatgaacaattgtgggtaaactggtatttactgagcctttattatgtactgggcacagggttgaatctggtcctcaaattctcaaaataagccaatcaatgccagcaagatgttcatccccattttagggagagagtcactgaggcccctaggaatgagataaattcacttaataccgtcactgtgtgcccggaccagttcagttccctctgctctcacccctcacagtctgtcctccccacagcagccaccagagggcgcctgtgagcacctggatcaggtcctgtccctcctctacctacaaccctccatggctcctacctccctcagggtcaaagcccaagtcctccccatggtccacatgacctgccccatcctctccctgccctcccttcttccctctcttcccactaactctctctgctgcagccacacgggcctccttgctgttcctccaacatgccaggcgtggtcctgccccagggcctttgcacaggctgtgccttctgctcaagatgcccttccacctccccttagacaaactggctgtgcctcctccatctggcctcaactcaaatggcatccagaacacccctcccccaactaaaggaggtcctcctgctgtagtgtctgacccagccccattcttgtgaatgtaacagacacacacacacacacacacacacacacacacacacacacacacacacacactgcagtcatgctgtatgtgacttggcaggcgtctctgttcctcactcaactgcagggagggagatacttctgtcctagccttctcagggcctctagcaccccacatcagagagcatggctcataattggcactgaaggaccaggcgcagtagctcacacctgtagtcccagcagtttgggaggccgaggcaggtggatcacctgaggtcaggagtttgagagcagcctgaccaacatggtgaaaccccatctctactaaaaatacaaaaattagcttaaaaatacaaaaattagctgggtgtggtggcaggcaagtgtaatcccatctacttggggggctgaagcaggagaatcacttgaacctgggaggtgaaagttgtagtgagccgagatcgtgctgctgcactctagcctgggtgacaagagtgagactcccatctaaaaaaaaaaaatctctatcagtatggatttgtacagattaatgttatactttggtttctaatccaattatgtgtacacacacacacattatatatatatcctcaacaacagcaaacattatagaaatatttgcaatgtacttgcaaaagaattttactgggcaacaaatatgtaaagagttcctacaaatcaataagaaaagatcaactgaaaaaatatgcaaaggatatgaacacatcaccacagaaaatacctaaaagtaataaaaatggactttaaatctgtgagaaaatggctgggcacagtgcctcacacctgtaatcccaggactttgggtggccgagttgggaggattccttgagctcaggagtttgagaccagcctgggaaacatggtgaaaccctgtctccacaaaaaatacagagattagccaggtatagtggctcatgactgtagtcccagctgctcaggaggctgacgcaggagaatcacttaaacccgggaggcggaggttacagtaagtcgagatcacgctattacactccagtgttgggcaacagagagagaccctgtctcaaaaataaataataaaaaatagataaataaattaattaaaatatatgagaaaatgttcaccctgattcataggaaggtagattcaagttaaaactacaataaggctaggtgtagtggctcacaccgataatcccaacactttggaagactgacacaggaagactgcttgaggcgaggagctcaagaccagccggggcaacatagggagatcgtggctctataaatatggggtgcggttgctcatgcctgtaatctcagcattttgggaggccgaggtgggtggatcacctgaggtcaggagttcgagaccagcctggtcaacatggtgaaaccctgtctctactaaagatacaaaaattagctgggcatagtggtgggcacctgtaatcccaactactcgggaggctgaggcaggagaatcacttgaacctgggaggcagaagttgcagtgagccacgattatgccattgaactccagcctgggcaacaagagtgacactctgtctcaaaataaaataaataaataaatatatatatgtatatgtatatgtgtgtgtgtgtgtgtgtgtgtgtgtgtgtgtgtgtgtatattaagactgagtgctgtggctcacacctgtaatcccagcactttgggaggccaaggtgggcggatcacctgaggccaggaatttgagaccggcctggccaacatggcgaaatcccatctccactaaaaacacaaaaattatctgggtgtggtggcaggcgactgtaatcccagctactcgggaggctgaggcaggagaatcgctagaacctgggaggtggaggttgcagtgagccgggatggcaccactgcactccacccagcctgggcagagccaggctccatcaaaaaaaaagaaaaaagaatattcagtgccacctagtttgtggcgggaaaagactggaaataaacagaataagcattgagaggcacttttctttttttttgtaagcgatgcatccgtgcaataaatcgctgcagcattattagccattctgatgggcagccctctgaaatttaagtgatgaacggccgcgatgcttgtggttgtcactagagggaagcacatgaccatgaaagcttcttctatgaccgtctcaaattattgaagggtttatcctgtgattttcattcttcggttcctttcttttcccttttatttaccccatgcatttctatccgttttcttctttttctttttctctttctttcttttccttccttctttcttttttctttctctctctctctttctttctttctttttaaatttttttattttttgagacggagtctcactctgtctcccaggctggagtgcaatggtgcaatcttggctcattgcaacccccacctcctgggttcaaacgattctcctgcctcagcctctggagtaggtgggattacaggtgcctgccaccacgcccggctaattttttttgtttgtttttgtttttttttttagacggagtctccctctgtcgcccaggctggagtgcagtggcacgatctcggctcactgcaagctccgcctcctgggttcacgccattctcctgcctcagcctcccgagtagctgggaccacaggcgcccgccaccacgcccagctaattttttgtatatttagtagagacggggtttcaccgtgttagccaggatggtctcgatctcctgacctcgtgatccgcatgcctcggcctcccaaagtgctgggattacaggtgtgagccaccgcgcccggcctagatacaggattttgccatgttgtccaggctggtctcaaactcctgacctcaagtgatcccccagcctcagcctcccaaagtgctggcattacaggtatgagctaccgtgcccatattaactgttttttgttttttgttttttgtttttaagatggagtctggctctgtcacccaggctggagtatggtggtgcaatctcggctcactgaaacttccgtctcccaggttcaagcaattcttgtgcctcagcctcccaagtagctgggactacatgcgcacaccaccatgcctggctaatttttatattttttagtacagatggggtttcaccatgtttcccaggctgttctcgaactcctgacctcaagtgatccacccgccttggcttcccaaagtgctgggattacaggtgtgagccaccacacccggccctgtattaacttttgatagatattcaacctacaaataggaaagtatatctagtataaaggtacagctcaaaaattgtcccaaaccaaacacatttatgatttgtgtaatcaggtccctgaactcatcaagaaaaataatatttctgcttcccccaccacccacaaagtcaccctgatcctcccccttggtctctaactttcccatggttaagcactggcccgatttctgtcttcataaattagtacagggcacagtggctgacatctgtaaccccagcactttcggaggctgaagcagaaggatcacttgaggccaggagttaaagatccgcctgggcaacacagtgagacccaaaacgtgaacatatgtttatctcaaacataaataacaaagtaaattaatcaatcagtactgcccactgtgaactacattacactaaatcccataatgacaggctttttgtcctcaacgtaaagcttgtaagattcatctgtgttgttaaatgtttttgtaggttgaatatcagcaaattttttcttgtaaaaggccgtatcgtaaatattttaggctttgtggaccaggcagtccccattgcagctactcacctctgtccctgtagtcaataggcagccacagacaatatgtaagtgagtgggtgtgggtgtgtataccaataaaactttatttataaaaataagtgatgggctgtgtgttagtcagggttctcaaacagaaccaatggggagtgtttgtgtgtgtgagagacagagagacagagagagagtgattttaaggaattgtggagtgcagtggctcacgcctataatcccagcactttgggaggctggggcaggaggatctcttgagcccaagagtttgagaccaccctgggcagcatggtatcctcatctctaaaaacaaacaaacaaacaaattaataaataaataaaatacatttgccaggtgtggtggtacacacctgtagtcccagctagttgggaagctgaggcagagttgaacccaggaactcaaggctgcagtgagctgtgatcacaccactgcactcaagcctgggtgacagcacaagatcccgtctaaaaaaaaaaaaagaaagaaaagaaaagaaaaagaaaaaaaattgatttgcttgatatgggggctagccagtctaaaatttatagaacagggcagcaggctagacattcaggtaagagtcaatgttgcaggccgggcgcggtggcccacgcctgtaatcccagcactttgggaggccaaggcgggcagatcacgaggtcaggagttcaagaccagcctggtcaacatggcgaaaccctgtctctactaaaaatacaaaaattaaccgggcagccaaggcacaagaattgtttgaaacccaggaggcagaggttgcagtgagccgagattgcaccactgaactccaccttgggcaacagaatgagtccccgtctccaaaaaaaaaagaaaaccaaaaacaaaaacaaaaaaaaaaacagaaatagagtcagtgttgcagtgttgggtccaaaaactgtagggcagtccccacagtctggaaacgaggactttttttttttctttttttttttttatggagtctcgctgtgttacccagcctggagtgcagtggcgcgatctctgctcactgcaagctccacctcccgggttcaagcgattctccagcttagcctcccgagtagctgggactacaggcacacgccgccacgcccggctaatttttttgtatttcaggaaagacggggtttcactgtgttgcccaggctggtctcgaactcctgagctcaggcaatcatctgcctcggcttcccaaagtgctgggattacaggcatgagccaccgtgcctgaagaaatgaggatttttatgtcccagtcttgaggcagaattccttcttctctgggaaaacccgaattttgctcttacatccttcaactgattggacgaggcccactcacattacagagggtcgtttccttcacttaaaggcagctgactctagacattcagcacatctgcagaataccttcagagcaaaacatgcagatgcctgttggagcaaacaaccgggcagcatggtctcgccccatggccccatgcaatcaaacatcacagtctggatttgatccggggccatggtttgacagctccagtgttgttcacgtgttcctgggcttaggatgggaccatgtcctgataaactcttcataagttaaaaatatcataagtcggccgggtgcggtggctcatgcctgtaatctcagcactctgggaggcttagacgggtggatcacctgagctcaggagttcgagaccatcccaatcaacatggtgaaaccctgcctctactaaaatacaaaaaattagccgggcgtggtggtgtgtgcctatagtcccagctactcaggaggctgaagtgggagaatcacttgaacctgggaggcagaggttacagtgagccgagattgtgccactgcactccagcccaggtgacagagcgagactccatctcaaaaaaataaaatcataactcaaaaatgcatttaagctgggtgcagtggctcatacctatattcccagcattttgggaagctgaggtgggaggatcacttgaggccaggagttcaagagcaacctgaataacatcataaaaccccatcttggccgggcacagtggctcatgtctgtaattgcagcactttgggaggccaaggcaggtgaatcacctgaggtcaggagtttgagaccagcctggccaacatgatgaaaccccgactctactaaaaatacaaaaattagccaggtgtggtggtgcacacctgttatcctggctactcaggaggctgaagcaggagaatcacttgaaccccagaggcagaagctgcagtgagccaggatcaccctgctgcactccagcctgggcaactgagtgagactctatctttaaaaaaaagaaaaagaaaaaaacgtatgttggaatcatctgtcttcgtttcctgggccttccttaacaaagtagcacagcttgagtggctcaaacaacagaaatgtatttcctgacggttctgggggctggaagttcaaattcaaggtgttggcagggttgattcctcctgagggctggcagggagagtctgtcccacccttctctgtccttgacctgtaagatgacgccttcatgtacacgtgacggtgtccctaagtgcatgtctgtgtccaaattttccccctttttataaggacaccaatcagtttggattaggatctggactaatggcctcattttttttcttttttttttagacggggtctcgctctgtcacccaggctggagtgcagtggcgtgatctcggctcactacaagctctgcctcccgggttcacaccattctcctgcctcagcctcccgagtagctgggactacaggcgcccgcctccatgcccggctaattttttgtatttttagtagagacggggtttcaccgtgttagccaggatggtctcgatctcctgacctcgtgatccacccgcctcggccgcccaaagtgctgggattacaggcgtgagccatcgtgcctggcctctaatggcctcattttattttgattacctctgtaaagaccctgcatcctaataaagtcaccttctgaggtcctggggttagaacttcaacatatgaatttggggggcagcacaattcaatgcataatcaccctgttgtccatgtaggttttcttttttttcattcctgtttccacccattctagtgtggatgttcatttcaattagttccagttctgggctcttacaaataaaaccgatatgaacatttccatgcatgtctttcagtatatacatgtgcccttccttccttccttccctccttccttctttccttcccgtccttccttctttccttctttccttccttgcttcctaccttctttccttccttccttccctccttctttccttccttgcttccttcctcctttccttccttccttctttccttccttccttccctccttccttccttccttttttccttccttgcttccttcctcctttccttccttccttctttccttccttccttccctccttccttcccttccttccctccttccttcctttccttccttccctccctccttccttccctccttccttcctttccttccttccttccctccttccttccttccctccttccttccttccctccgtccctccttccttccttccctccttccttccttccctccctccttccttccctccttccttccctccttccttccctccttccttccttccctccatccttccttccctacttccttcctttccttccttccttccctccttccttccttccctccgtccctccttccttccttccctccttccttccttccctccttccttcccttccttccctccttccttccttccctccgtccctccttccttccttccctccttccttccttccctccttccttcccttccttcccttccttccttcctttcttctttccttcctttccttccttccttctttcgttccttccttcttttcttccttcctttccttccttccttccttccttccatctgtcctttcttcctcccttcctcccttcttccctccctccctccctccttccttccttctttccttccttttttctttttaatcagatggagtcttggtctgtctccaccctggagtgcaatggcacaatctcagctcgctgcaacctccgcctcccggatttaagccattctcctgcctcaacctcccaagtagctgggactacaggcacatgcccagctaatttttgtatttttaatagagatggtgtttcaccttgttggccaggctggtctggaacgctggacctcaagtgatcctcccaccttggcctgccaaagtgctgggattacaggtgtgaaccatcatgccagctggcttgctttcttttctttctctttctctttctttcttttttctttttctttctttctctttttttctctccttctctccctttcttccctccctctctccttccttccttcctcccttccttccttctctctctctgtctctttcttctttttgaaatagggtcttgctctgttgtccagactggggtacagtggcatgaccatggttcattgtagcctcaaaccctggggttcaagtgatcctccctcctcagcctcccctcagccttccaagtagctgagaccacaggcatgtgccaccatgcccagctaattttttttcttttttttgtagagtcggggtctcactcgttatgttgcccgggctgctctgggacccctgggctcaaggagtacccctcattgggctcagcctccgaaagtgctaggattataggcgtgagccactgtacccagccaaatgtccccttttcattaggacactggtttttggaccagggtcccaccctactcggggatgatgtcatcttaactaactccttctgcaaagacattacttccaaataaggtcaccttctgaggtcctgggtgttaggacttcaccatatgaatttagggaggcgcagtccaactcataaccaccctgttgtcaatgtagggggttctttttctttttctttctttttttttttgtttttgagatggattctcgctctgtcgcccaggctggagggcagtggcgtgatctcagctcactgcaacctctgcccacccggttcaagcaattctcctgcctcagcctcctgagtagctgggattacaggcgcccaccaccacgcccggctaatttttgtatttttagtagagatggggtttcatcatgttggccaggctggtctcaaactcctgaccttgtgatccgcccacctcggcctcccaaagtgctggtattacgggcgtgaacccagccggggggttatttttcattgcatccattctcgtgtggatcttcattaggttggttccaatctggggcttttatgagtaaagtgactatgaacattcccatgcatatcttttgctatatagatgtacccttccttcttttttttttttttttttttttttttttgagacagggtccgatctgtcacccaggctggagtgcagtggctcaatcacagctcactgcagcctcaaccccccaggctcaagcaatcctcccaccccagcctccagcctcctgagtagctgggactacagacacttgccatgcgtggccaattttttctcttctcttctttctcttctcttctcttctttctcctctcttctattctttctcttttcttttctttttttagacatggggtctccctatgttgccccggctggtctcgaactcctgggctcaagtgatcctccagctttggcctcccaaagtgctggggttacaggcgtgagctactgcacccagctcaagcattgttaatagggatacatataacataggtgaagttcctgcacacagtgggaccacagagatgctgtcatcatttgtgattggctcagggaatcaggcaatgaattgcccattggagaagacaaggaatagaacagagggaagagagagattaaaggttaaaagcactgggcgctgtggcttacatctgtaatcccagcactttgggatgccaaggcgggcagatcacctgaggtcaggagttgaagaccagcctggctaatatggtgaaaccctgtctatactaaaaatacaacaattagccaggcgtggtggtgcgtacctgtagtcccagctactcaggagtctgaggcaggacaatcgcttgaacccaggaggtggaggctgcagtgagccaagattgtaccactgcactccagcctgggtgacagaatgagactctatctaaaaaaaaaaaaaaaaaaaaaaaaaaaaaaaggctggagggagttgtgtgttgcctggcaggtccacgggggacagagatccctcctacccacctgtttccccccagttctgtgccagtggggtcagcggggagatcaggagaaggagctgctggtgggttcagttgctttcgaggtgctggggacaggtggctgcagggagagtgagtgaactgtggggtggaccaatacaagggccaccctgtggggtagtttggggggctatctgggttcagggaacctccacagccccgtccctgcctcccagagcagcaggtacctgcctggggacagcaggcagccaggctgggagctggggggttggggaatctagctactctctcatccagtcccagctactgctgctggccaaggctgtgacctttctcccagatcctggagctgagtaacagttactggaaaaataagttggccatctgggggtggccacagccccatcctcttgggtccccagcctggctgctagaagtgagggtaccagggctgggctgtctgtcccatacaacagtaccatagccaccggtgtgaccagaccaggtacctcctccccgtcacactctatccccaccatgccacacttcccccactgcaggggcctgaaatgacagccccactcccatacccggacaccaaggaaggcgtgatgggtgggtggagaaagagtcccgggcatccctggcagccctgaatgtttcctctggccccagtctcagagacgcccatgcctgggaagagcaagtcagcaacttggcccagaaggagactttgacagcgaggagggctgcatttgaatttcagctctgtcactttttttgcaggtgactgagcaggtcactccttttctctgggcctcagtttccccctctggaaaaatgggaataatgaagcaccctcctggccggtttcgcaatgctcaaatgcaatatggttgtgctgagtgcaaagcgtggtcctgagagggcactcaatacacatgaacgattcagccctaagttctcgaaatatgttcaaggtacccgctgcgggtctagctctgtcctagacacaggagatccagcagcaaacaaaagtgacactgacacctgtccttctcgagggtttgggactccagggagagacacaaaccgtgaattaaaatgttaacgttcaagaaggatgaatgctataaagagaaatgaaactatcgttagatcttattattgttgtgactgttactgttgatacccaattgatcgtgattatagccctgattccagcttccacagttattggaggtatgcaattatttagcaccaactgtgtaccaggctccaaatacctatagccccacaaaatcatttcccagaagagaaaccaaggtctcaggtctgtccaagattgtgagctggttgtgcagggcaggcctgggagtggatctgccagatggcacgattcccggacctgcccccacctcccagggggagctggcatcctcccagctggacctggcccccccttggagcttccccaacctggggatacagaagggcccccacggggagggaggcagccagggcaggcagtggcacagagcaaggagggagcagggcgtctgccacccgcccccacggctgcctgggaaacgccacggcctaatcctggctcaagaggacacgttgtaccagagattatataaaccgacctctccctttgtttgtttaattctttcaggctttttccctcatccttctctctttaatcgctctgccaacagggctgggggtggggtgctccgggctaggcctcttccaggagggagggggctgcatacccagcaccccccactctggtcatacccctacctggtttcccagccacccaggcccgctcctcccccagtcacacacaccaagtcctgccggtggcaggggtgtggggctggacaggcttggccagtggagtgagtctgagaggccaaggccaagggcactgagtcaggctcggactctgctgggcccctaggatgtggcctctccacttggcactcagcttcctcttccaaaaaaatgggatccctgtggtcccaacccccaggttgttgagaacacgcccatgcaaggagtgagcatggcccatggtggatgccgggtgagagccgctgcctgctcccagcccacactacagacacccagggaacagtttcgccctcagactggccctggagcaccgtgactgtggtggccaattgggcctccgagatgtccacgatgcctggtgggtgctctgatgtggaacactgggcaccatcacccagagagggcaaccaggggtgtctggctttgtgctcacccaccgctgaccccgagcctggccctggccctcaccaagacccagtatttccatctgtgtcctggggaggccaacacgaacctccccaccatcagggcagtccacccacagaggggcctgggttcccatcctgaccccctcctttaccacctctgccaccctgtgctgcttggttgctctgtgcctcagtttctccatctgtaaagtggggatcatcatagcagtcagaccccccaagaggattaatcgtgttaatccttataatgcatttattcttaatttatattactttttttttgtagagatgggcttttcccatattgcccaagctggtctggaactcctgggctcacgtgatccacctgcctcggcctcccaaagtgctgtgattacaggcatgagccaccacatctagctatgcattttagaacgggccctcacgtatattaacatgaaagtatctgctaactaaaagaaaataacagcaacagaaataagtaaagaaatggccagttgcagtggctcacgcctgtaatcccagcactttgggaggccgaggcaggtggatcacctaaggtcaggagttcgagaccagcctgaccactatggtgaaaccccgtctctactaaaaatacaaaaattagctgggtgtggtggcgtgcacctgtagtcccagctactcgggaggctgagacaggagaattgcttgaacccgggaggcagaggttgcagtgagctgacatcgcaccactgcactccagcctgggcgacaaagtgagactcagtctcaaaaaaaaaaaaaaaattaaaattaaaaaaaaaagtaaagaaagaatccaggcccattgcacacatgggaaactgaagttgatgttcccaaagcaagtcagaggcagggctgggagctgagaaatcagctgggaacctctcaccctacacctccctggagcccagtggagggaggctgggggcaggggacagagaactgaggtcatggtgccaggtcccaaggggcccaggctcacgttcctgcctgatggctgcaagctcccaaacatcccactctgagcctctccttcccttctctgtacgacaagccccagggtggcacagggtgggcggggtgttggggtgcccggccactcccagccctttacataacctgcggcacagcaggaaatcaaagtgccaacaactgcctcctcagtaaccgacttcctgtcgttacccacccaccttgggcaccagctgcctgctccctacctccagtggcagaggggtcccatccctgaccccagggtttcctccccaaggaagggcccccgtaccctaggctgctccatcatgcgaccctgagccagtgtccagccagctctggcctcagttcctccatccagatgtgtccctgggctgccaggaccgtcaccctgctcctttcggccactggctgggagactgcatactggctgccccagacctgaggctggaggtcagagggcaaagggcaaaggccaaggaattccctttttttttttttttctgtgacagagtctcgctctgttgtccaggctggagtgcagtggcactatcttggctcactgcaacctcagctcccaggttcaagcaattctcctgcctcagcctccctagtagctgggattacaggcatgtgccaccatccctggctaatttttttttttttttttttgtatttttagtagagacggggtttcaccatgttggccaggctggtcttgaactcccgacctcaactgatttacctaccttggcctcccaaagtcttaggattacaggtgtgagccaccacacctggctggaattcctttttttaatttatttattttattaatttatttatttatttattttgagacagagtatcactctgttgcccaggctggagtgcagtggcgtgatctcggctcattgcaacctctgtcccccaggttcaagcgattctcctgccccagcctcccgagtaactgagattgcaagtgcacgccaccatgcccggctaacttttgtatttttagtagagacggggtttcaccatgttggccaggctggtctcgaactcctggcctcaggtgatccacccaccttggcctcccaaagtgctgggattacaggcatgagccaccgcaccggcccagaatttcctttttagagcgagagaagcaggagttgcctctcccattgagggagggagactctggttcttcagggcttttcaaagctgtgggtaggcggtagagggcgccccccacccagtggtgcaaagaggagaccccagccctgctctggaagggagtgagggattggggggaaggtctctggggcaaacagcacttagtgacagccacagtcatatgactgtccgcattttacagatagggaaactgaggcatgaagcaaggccgccatctgcccaaggtcccgtggtctgtaagtggtagagccaagatttgaacctctgaagacaggggtgttggtggaggtgtcagggaatgggacctccgtgggctctgtggggctggaaatcacaatatctctgcatagacatgggtgacgttcccttccgtgccgtgacccctgccaggcatgttagcgggttcctcttagacagatggagaaactgaggcccagaaaacagaagcagcttgggcaagttcattcatgggatatggtgagagaggctcggccagggaaataccctcagctgggaggactccaggacctgcaggcagcatcgccacccttcatatcgcccaccttgtgaggtcctagtaccccaggcctcagtttctccatctgtgaagggatagatgccagcagtctgtgactgcgacctcggaggctggctccctggggctccgcctggctgggcatgagggcctggagtgtgtgggcaggctctggagagccaggtgatgcctgtgcctacacccacggtgccagccctatgggacagaggggctggggttgactcttctgccacgctctgtgctctcctttccctactgcgcagggccaagcttggttccacgtcttcatccaaagctgcacagcacgtgagcgggaaaagcagggccagctcagccagctccaaagcccagctctttccacggtgtccggaaggtttcagagaactcaggacactagctccctggcctggagccccagggcccatgggcaaaagactgcattttcctgagcctcagtttccccgtctaccccacaagggccatcatccacctgctcattgctctgtgtcttttttttttttgagagggagtctcactctgtcgcccaggctggagtgaaatggcgtgatcttggctcactgcaagctccgcctcccgggttcatgccattctcctgcctcagcctcccaggtagctgggattataggcgcccgccaccacgcccggataatttttgtatttttagtacagacagggttttgccatgttggccaggctggtctcaaactcttcacctcaggtgatctgcccgcctcggcctcccaaagtgcttcacttttttttttttttttaagatggagtctcgctctgtcgcccaagctggagtgcggtggcgcgatctcggctcactgcaagctccacctcctgggttcaagcaattctctgcctcagcctcccgagtagctgggactacaggcgcccgccaccacgcccagctaattttttgtatttttagtagagacggggtttcaccgtcttagccaggatggtctcgatctcctgacctcgtgatccacccacctcggcctcccaaagtgctgggattataggcgtgagccaccgcgcccggccccaaagtgcttcactttgaagaacaagtaatgtgtccagtgagggagaaacactgggtagatgtcctgctccatggatcgccaaacacaggaagtgctaccagctgtctatccctcatccctgttgctgctgggcttctcctccccaaccgtgtggaagattgggagggagggttctagggctgagcccaaacagaccctgaaccacatcctgagcaagcctcacctcttgggagggctgcaggaggggttggggccttgactcagcagaaacacaagcagcggcctccacgcttgggatctgagtcccaccatgttgccctgcacggcctgggtgcgaccgtgaggggacctaggagcctaagtgttgcatgtggccatggatccctgggacagaccccttcctctctcagcctcagttttcccatctgtaaaatgggacaggccaggcgcggtggctcacgtctgtcatctcagcacttttggaggccgaggcgggtggatcacctgaggtcaggagttcgagaccagcctggccaaagtggcgaaatcccgtctctactaaaaatacaaaaatgagccaggcgtggtggtgcatgcctgtaatcccagctactcgggaggctgaggcaggagaatcggttgaacctgggaggcagagattgcagtgagccgagattgcaccactgtactccagcctgggcgacagagcgagactccatctcaaaaaaaaaaaagaataacactggctttgggagctgtgtgcgaagaggtgacaatgacaatcaatcccaggcgagccatggggggctgaaccaaggaggctccccctgcatccaacccagacgcattgatcacgcgcctaccatgccctcttgtcgaacccagggcagcctggagaggtgggtacaggggtcaccaggcagaggacagagagcccaggggcaggacagagacactgaagcagagggagcctgagttggcctcggactcaatgtgtgaccgtgagctggtgcctcagtttacatatctgtaaaatggggtgagaagtggctatgtcaggagtcataagatgggactcatctgtaaaagtacctggcacatggtacatgcacaataaacctgtcattgtcctcatctgccaacactgtaacgaggatatttatttatttattatttatttatttattttcgagacaagagtctcactctgttgcccaggctggagtgcagtggcgcaatcttggctcactgcaatctctgcctcccgggttcaagccattttcctgcctcagcctcccaagtagctggtactacaggcgcatgccaccgcgcccagctaatttttgtatttttagtagagacggggtttcaccatgttggccaggctggtttcgaactcctgacatcaggtgatccacctgcctcagcttcccaaagtgctaggattactggcatggccaccacacccggccatgaggataaatgaagcccgccctatactcaggagactgaggtgggaggatcacttgagcccatgaattccaggctgcagtgagctatgattgcacccgtatgatccagcccaggcgacagagcaagaccctgtctctacaaaaattaaaaaattagccaggcatggtggtgcattcctgcactcctagctacttgggaggctgagtcgggaggatctcttgaacccaggagttcaaggctgcagtgagccgtgactgcaccagtgcactccagcctgggcaacagagtgaaaccctgtctctaaaaaaggccaggcgcggtggctcacgcctgtaatcccagcagtttgggaggcagaggcgaggggatcacctgaggtcaggagttcaagacagcctggccaacatggcgaaacctcatctctactaaaaagacaaaaattagccaggtgtgctggcggccgcctgtaatcccagctactcgggaggctgaggtaggaggattgtttgaacccaggaggcagaggttgcagcgagccgagatcacgccactgcactccagcctgggcgacagagtgaggctctgtctcaaataaataaatattaaaattaaaacatgttaaaaatgtaataaaaagccagccctctgaaggactggcccatcgtagcaagtcaataaatgtttgttgagtaaataacaaaaataatgacgcagctccttccttgggcatgatgtcttcccgtttccaaaactgctagatttctgcagctggcttctcagcactgtggacatccgggccagatcggcatgtgtgtgttggggaatgtgctgtgcatggcgggaggtttcgcaacatccctgcctccacctactgcatgctagcagcaactccccccacccacccacccacccctgtcccagtcataacaaccaaaaatgtccccagacattgccaagtgtcccctggggggcagaattaccccgttgagaaccactgcccggcatcgcggttactgttcaaagttcccttttagcagaagagaataaaggctcagagaggggcaggtctagcgcagggtcacacagcacagtggggtggagccaccttctgtgctgggcatgactccgggcacagccgagccgaggtgggggccaacaacccctaccatgccagggttccaggaactgccagcaggggcccaggccatgccactgttgcaaaatctgagggcggcataccggcaagcctgagcagttgccacggcctcagccccacgggcaccgccaggaaagaaaaatgcaacttactcctgggcaccgggacaaccggtggaacctcaggcgtgggacggctgccggaaagcagggcccaatcagagacagctgccttgctgtgtggcctatcagaagatggctgcatatgtcctggccaatgagaatgccccagtgaggaaggccacgcccccccaagtgaagcccattggccccatgaaagggcttgaggtgggtccctttggtcctaaaatttcttcttcactctgttggttgcagacgcaggtcagctgaggcttcctgatgtgtgggcactgagggtcgatctgggagagcaaccttctcagaggtgtaacccccagactgttaccacttaaccagagccaggattctccttaacatttcaatgtcacttattaaacctttatacatttatttattaaatagagacaggggtctcgctatgttgcccaggctggcctcgaactcctggcctcaggtggaattcccaccttggcctcaaattcccaaagtgctggaattatgggtgcgagccaccacgaccggcctcattaaacatttattgagcacctgctatgtgctggtcactgaggatgtgaagatgaacaaggtggctgtagagaaacagccacattggaggaagggcattccaagcagagggaacagcccatgcaaacagcctggggcaggacggcacctgatgtggaggaacagcgaggaggcccgtgtggctgcagcggagggaggagagggagagagggaggaggcgagggcagggagggacagggtgggtcaggcagggctttgtagccctcggggaggactctgtcgcctggagggcagtgaggagccatggagggctttaggcagtggagagatgtgatgtgggactagagccaggtcctttccctctctgagcctcagtctcctcatccgtcaaatgggggaatgagaatgcctacctgggggccggatgcaggggggagggaaggaccctgcacagtggccggcacatggcaggtacacagctcccaccaaggtccagccctgtcatagcccgcctggacctgtgccgtcccctccgcctggatgctcccactcccaccctcgcccctccacggcctgtcctccctgaagcagccagagggtgcctgtgagcacccaagtcagggcccatccctcctctgcccgcagccttccatggctcccacctccctcaggatcaaagcccaagtcctccttgcagcctacgaggccctgcacaacctgttctgtcccctccctgccctcccctccccgcttactccttgtcgctcactctgctccagccacacaggcctccttgctgttcctccaacacgccaggtgccatcctgccccagggcctttgcacagacctgaaacgctcttcccccccccccgcccccccctcccgccgcccggctccccatggctcctcccttgcctccttcaattctcagcttcttaaaattgcacccttggccaggcgtagtagctcacgcctgtaatctcaacagtttgggaggccaagggggacggatcacctgaggtcaggagttcgaggccagcctggccaacatggcgaaaccccatgtctactaaaaatacaaaaaattagctgggcatggtggtgggcgcctaaaatccagctactgggaagctgaggcagaattgcttgaacccaggaggcggaggttgcagtgaactgacattgtaccattgcactccagcctgggtgacagtacgagactctgtctcaaaaaaaagaacagggcctggcacacagcaggtgctcaataaatgcgggtgcatgaattgctgaaaggcggctgccattatccttacccctccatgttccagatcagtccctgtccccctttttgccctccttctcccactccagccaccctccccagccctgggggaaccccagacgtcctttgggtgggagagggaggagcaggtaggaccagccacctccagcagccttcagcccctcgtcacaccgacggccaagcaggagtcctggtgcttttcttcttgaatcagaggagggggtataagcccggcagtggccacgcttgtgtagggggaacttcatgccacacggttgcctgagctcagttctggccaggggctgtcctgtgggatggcttccctggaggtggtggggatggttctacgtgggtgggtgcagaaatgccgtggggtcccgaccccacactcaacctgtaagcccagctcagaccatcttggtgggggtggtaggcaaggccctggcgagccccctctttccctatttctggcccagggtccccgcctttagctctggactccaccagcaaaaccccaacgccacgaggttttcaacgatgaacagatggtcacaggcggtgggggtgggggctgagctgagtctgaggggacccagggtctctggagcagtcctgctgccctcccagtggggaaactgagacagggagccccctccgtgcccctgtgcctggggctgggaaaccggtgccatcctcggaagatccccagagcggccacgtcatagttggcgagggcagctccggggagggcgaggaccgggcccactgccatgtcaaattcctcccgggagcggtgggggaaggagaggcagtgcttttttttgtctcccctgcatcctcacccccaccaactccgcgacagaatcaaaaagaggagagagagagctgttggcaggaagaaggaattggagccaagccgaggctgggctcaccctgaaaaatcacactctgggcgggaagagaggacagaggctcttccaccccctttccagcattttgcaaaggcggaaagggggtggcccactcaaagggcatcagacgtggccttcacggcccgcagctggcagctgccacctctcccacgagtggcttgacaggctttctacctccagacctcagcttgggccgtcctctcctcctggaatgccttcctcatccacctcagtctcctcccaggcaccacctgggatctggacttcaagtcccatggacctacaaggccaagaagggtcgcgttgcatcctaaggccaaaataaaccccaaaagcagtaatatgtaatcgatctttatttaaatattggtacttcattcattctggatcttctgcaatcacttttattcttagaaagtttgtgttaaaacatgagttatcagttgggtacggtggccccacccacccagcacccagtgtcaacccagcactttgggaggccaaggcaggaggatcacttgaggccaggagttcaagactagcctgggaaacatagcaagaccccatctctacaaaaatttaaaaattaggcagggcgcagtgactcatgactgtaatcccaccattttgggaggccgaggcaggcggatcacttgagttcaggagttcgagaccagcctggccaacatggcgaaaccccgtctctactaaaaatacaaaaattaaccgggtgtggtggcgggcgcctgtaatcccagctactcagggggcaggagaatagcttgaacccagaggcggaggttgcagtgagccaagatcgcaccactgcattccagcctgggagacagagctagactccatctcaaaaaaacaacaaaacaaaaaaagagagagagaaaataaaataaaataactccagggaggggcaagggctatgcgtatctgaactctgtcccagcccatggagctgcgcagggacggaggggccccaggcacagtggggccggctgcactaacctggtcatcagtctttgctccgggagcttcagcactgagttttcagggaaggcatggctgcctgggttccttcctagtgccggagcccgctctcaggggcatgaccccagcagatccagccacgccagcggtcccattgtgtgaccttggataacccctttccttcatctgacgcctcctctatcaaacgaggtaataagggctcccctgcctggcctggggctgtctgtgcatgaaatgggataattgccggaacccggcctggctaccggagctgttattaaggctgcagagctacctgtgggcctcaatttcctcatctataaaatgggcttaatcatacctgctgctgttaacctctcagggctctggaggatcaaggggcactgaggatgccttgcagaggaaacgtctgaaggccgagcaaattctgcaaaagtggcctcagtggcttttcttgtgaggttgcctgccccccaccctcaatttgtataacgtcccctgcagaagtgtggagaaagaggaaaaaatataacaaacaaacaggcaagaaacagccaacacagccacatccattgttgcttttttttttttttttttgagacagagtcttgctgtgttgcccaggctggagtgtagtggtgagatctcggctcactgcaagctccaactcccgggttcaagcgattcttttgcctcagcctcccgagtagctgggattacaagtgcgtgccaccacgcccggctaattttcgtgtgtttttttttagtagagagagggtttcaccatgttggccaggctggtctcgaattcctgacctcaggtggtccaactgcctcggcttcccaaagtgctgggattacaggcgtgagccaccatgcccagcccattgttgcaattttaacctcttttctcctgtccccgaagcttacccctcagtttctttttttgtttctttttttttttttttttttgagatggacttttgctctgtcgcccaggctggagtgcaatggcatgatctcggctcactgcaacctccacctcctgggtttaagcgattctcctgcctcagcctcccgagtagctgggattacaggtgcacgccaccacacccagctaatttttgtatttttagtagagacggggtttcaccatattggccaggatggtctcgatctcttcaccttgtgatctgcccaccttggcctcccaaactgctgggattacagacatgagccactgtgcctggccatccctcactttcttttcctgctcttttttgctgctaagatatagaaggtagagccattggggcttaaggagatgggctttatgagtcaacttgcccaaattcaaatcccagacttaacactggctgtgtggcattgaggaagtgcctcaagttctctgtgcctcagcttcctcatctgtagactgggaatgatactgttaggttggtgccaaagtaattgcagtttttggtcaggcacggtggctcacgcctgtaatcccagcactttgagaggccgaggtggtgaatcacaaggtcaggagttcaagaccagccagaccaacatggtgaaatcccgtctctactaaaaatacaaaaatgagcccagcgtggtggcacgtgcctataatcccagctacttgggaggctgaggcaggagaatcgcttgagccctggaggcggaggttgtagggagccaagctcatgccactgcactccaggctgggcaacagagtgagactccatctcaaaaaaataaataaataattattatttggtagagatggggttttcccatgttggccaggctggtctcaaactcctggcctcaagtcatctgaacgccttggcctagttttggtatttttattagagacgaggtttcaccatgttggccaggctggtcgcgaactcctgacctcaagtgatctgcccgccttggcctcttaaaatttttacttttttttagtgatgaggtctgcctctgttgcccaggctggagtgcagtggtgtcatcagctcactggaggctcagcctccctgggctcaagtgatcctccctcctcagccttctgagtagctgggactaggggtgcgctccacacacacagctaattttgaaattttttgtaaagatgggatctctctaggttgcccaggctgatctcaaactcctgggctctagcgatcctcctgcttcagcctcccaaagtgctaaaattacaactatgagccaccctgctcggttttgtttttttacattgtttagtggtagaaagaagtcaaaagaatactttgtgacacgtgaaaagtacatgtgattcacatttcagtgtgtgtaaagtttgattggcacacagccacgtttattcatgaccatgccgtctatggcagcttttgtgcactagggcacagccaagcaggtgcaatggggatgatatgtcctgcaaagatgaaaatatttactctctggctctttacagaaaaagtttgcccacccctgagttaatgtatcatgagcactttgaacaatgctgggcacaaaatgtgcttgggattgttattcaaaatgtgtttcaggtcgggcgtggtggttcacgcctgtaatcccagcactttgggagactgaagagggcagatcacctgaggtcaggagttcaagaccagcctggctgacacggtgaaacccattttaatctctactaaaaatacaaaaattagccaggtgtggtggtgcgtgcctgtaatcccagctactcaggaggctgaggcaggagaatcacttgaacccatgaggcagaggttgcagtgagccgagatcgtgccgctgcactccagcctgggcgacagagcgaaactccatctcaaaaaaaaaaaaaaaatgtgtttcaggctgggcgaggtggctcatgactgtaaacccaacactttgggaagccaagatgagaggatcgtttgagccctggagttcaagaccaccttgggccacagagcagataccacctccacaaaaaaattttaaaaaattagccagttgtggtggtgcactcctgtgtagccccagctgctcaggaggctgaggtaggagatcccttgagcccaggaggacaaggctgcagtgaactattattgcaccactgcactccagcctgggtgacagagcaagaccctgtgtcaaaaaagaaatgtacaaaggttaaaaaaatatatatggttggccgggcgcggtggctcacgcctataatcccaacactttgggaggccgaggcaggcggataatgagatcaggagatcgagaccatcctggctaacacggtgaaaccccatttctactaaaaatacaaaaacaaaattagccaggcgtggtggcgggcgcctgtagtctcagctacttgggaggctgagtcaggagaatggtgtgaacccaggaggcggagcttgcagtgagccgagatcgtgccactgcactccagcctgggctacagagctagactctgtctccaaaaaaaaaaaaatatatatggttcacacaaaaattatatcctatgttgttctctataaacatcccatcatattatgtctcccagaccactgacaatttttggaagcctcactctgccatctcgtgaaatgtcctccacagtcccctactgttggacacttaagctgttcccagttgctaagacggagctgcagggacagcctcgcgttttaagctagatttgcttttatgtaacaattacttctacatcattcactatgtgttaagtcctatctctgggcactttgcaaatatcaacttatttcatgctcactccaactcccataaactccccattttgcagatgggaaaacggaggttctgtaggttgaagtgacttgcccagggtcacactaccaggatatgaactcaggctggacaggtcctgtcagtgccctgagacgcccttttccttccctacggtagagacccaggagctaaatcactctgtcaaaggggaacaaaaattcttgccagacatggtggctcacacctgtcatcccagcactttgggaggccaagacgggtgagttatgtgagcccaggagtttgagaccagactgggcaacatggtgaaaccccatctctactaaaaatacaaatattagctgggcatggtggtacatgcctgtagtcccagctgctcaggaggctgaggtgggaggactgcttgagcccaggagttggaggctgcggtgagccatgatgaggccactgcactgtggcctgggcaacacagtgagaccctgtagaaaaaggaaagaaaggaaagaaaagaaagggaaggaaaagaaagaaagcaaatgaccatgcaatgaattttacagaaatgcacttggtaggggacccatcccattcctcagcctttgaccaagaaacatatgtttttattttattttaattaattagttaattaattttttgagacagagttttgcctcgtcgcccaggctagagcgcaatggcatgatctcggctcactgaaacctctgcctcccaggttcaagcgattctcctgtctcagccccctgagtagctgggattacaggcatgtgccaccacccccggctaatttttgccttgttagtagacacagggtttcatcatgtctgccaggctggtctcgaactcctgacctcaggtgatctgcctgcctcagcctcccaaagtgctgggattacaggcgtgagccaccacacccagcctattttatttatttttgagacagggtctcactctgttgcccagcctagagtgcaacggcacgatcatagctcgctgcaacctctgccttcagggctcaagccatcctcccacttcagcctctggagtagctgggaccacaggtgtgcaccaccatgcccagctaaatgtttgtattttgtgtatagacgtggtcttgtgtcttgtcatgttaccccagctggtcttgaactcctggcctcaagcaatcctcatgccttggcctcccaaagtgctgggatgacaggcatgagctaccacgcctagccagaagcaaatattcatataaaagttcctccatgaggccggatgtggtggctcacacctgtgatcccagcactttgggaggctgaggcgggcagatcacctgaggtcaggagtttgaaaccagcttgaccaacatggcgaaatcccatctcgactaaaaatacaaaaattagccgggtgtgatggcgggtgcctgtaatcccagctactcaggacgctgaggcaggagaatcgcttgaacctgggaggcagaggttgcagtgagcctagatcgggccattgcactccagcctgggcgacagagtgagactctgtcccaaaaaaatacataaaagctcctccaggaaggttcccagcaactttgtgagagtccaggacagcataacaccccctctgccatatctaatcgtaggtcaatgggcaagcaaagcatcatacatccatacagttcaatccccatccccagtaaaagaatgcacagtcatacacagaatcacatgaacaaatctcagataatgatgccgagtgaaagacaccggacactaagaatgctgctggccccagctatgctcatctgcttccttattgcctgtggctgcttttgagctgcagtggcagagttgacgagtgagttgctttggatagttagtaactctccaggcctcagtttctgcatctgcaaaatgggggtgactgctgggcatggtagctcatgcctgtgtttccagtgctttgggaagctgaggcaggagggtcgctggagcccaggagttcttttgaggccatcctgggcaacacagggagaccctatgtctacaattttttcgagacagagtcttgctctgttgcccaggctggagtgtagtggggtgatctcagctctctgtaacctccgcctcctgggttcaagcaattctcctgccttagcctcccaagtagctgtgattacaggcgcctgccaccaccaccacgcctggctaatttttgtatttttagtagagatggggtttcaccatgttggccaggctggtcttgaactcctgacctcaggtgatccacctgcctcagcctcccaaagtactgagattacaggtgtgagccaccatgcctggcctacaaatcttttttttttttttttttttttttttttagccaggagtggtgacacacctgtggtcccaatggctcaggagtctgaagtgggaggatcactttagcctgggaggtcgaggctgcagtgagccatgatcatgccattgcacaccagcctgggagacagaataagaccctatctcaaaaagtaataataataattattatatatgtacatataatatataatacatatatgagatttttgaaaattatgttgttttagagatggagtctcactgagttgcctaggctggagtgcagtagcattcatagccatgatcacagcacactacagcctggaactcccgggctcaggtgatcctcctgcctcagcctcctgaatagctgggactacaggcctcgccgctgaactaggtcttttatttatttatttatttatttgagacagagtctcactctgtcgcccagggcagagtgcagtggcgtgatctcggctcactgcaatctccgcctcccgggtttaagaggttctcctgcctcagctttccaagtagctgggattacttcgaactcctgacctcaagtgatctgcccgcctcagcctcccaaggtgctagtattataggcatgagccactgtgcccggccgtttttgccttttgcatagcacagtcataaatatcctgggtcatgtttcctgtggatatttatctaggagagcaaaggctatgttacttggtgcatgcatgttcagcgttgtggctgatgtcagtctgtcttccagagagactgcagtgtggaagagctttgtgtatccatggcttctgacacttgctattattggacattttaaactagggggcagtgaaaggggagtaaaaaggggcctgtgactttatcatacatgtcctggattcctaacaacgttggacatctcttcatctatttgtcggatgctcgtgtttcctgttttgtaatatgccttctcaggctttgcacttattattatttttttttgagatggagtctcgctctgtcacccaggctagagtgcagtggcgcgatctcagctcactgcaagctccacctcctgggttcatgccattttcctgcctcagcctcccgagtagctgggactacaggctcctgccaccacgcctggctaattttttgtattttttagtagagatggggtttcaccacgttagccaggatggtcttgaccttctgacctcatgatccgcctgcctcggcctcccaaagtgctgggattacaggcctgagccactgcacctggcctgcacatttttcttttgagtggttgtcattttcttattggaacttcattctattttttttttaagaaatgggggggcggtctcactatattgcccaggctggtttcgaactgctggcctcaaatgatcctcttgcctcacccttctgagtaaggaacttgattcttcttaaaagactgtatgagattccattggaaggttttcctattctttacggcatgcattctcaacaaggacaaaaattggtttgtggcagggggaggggtgaaaaaaatcttactcttttaatgtaaaaaacacagcagaacactgatatacatatagtatataagcaaatatacaggacatctatgttactaaattttcatgtggggtgattaggaaaaaaatgtctaaaaagatctgtggggtgataatgacaaacaaggtttttttgttgtttgttttttgttttttgtttttttctgagacagagtctcgctctgtcgcccaggctggagtgcagtggcgcgatcttggctcactgcaagctccgcctcccgggttcacgccattctcctgcctcagcctcccaagcagctgggactacaggcacccaccaccacgcctggctaaattttttgtatttttagtagagacggggtttcaccgtgttagccgggatggtctcaatctcctggcctcatgatctgcctgcctcggcctcccaaagtgctgggattacaggcatgagccactgctcctggccccttatttcttcattttgagacacagtctcactctgttgcccaggctagagtgcagtggtgtgatctcagctcactgcaacctctgcctcctggattcaagcgattctcctgcctcagcctcccgagtagctgggactgcaggcacccaccactacgcccgtctaatttttgcattttttgtagcgatggggtttagccatgttggccagcctggtcttgaactcctgacctcaagtgatccaccagcctcggcctcccaaagtgctgggattacaggcgtgagccaccacaccgggcctctgttggttttttgagacaggatctcactctggagtgatctgcccaggctggagtacagtgtcgtgatcacagctcactgcagcttcaatctcaaggctcaagcaatccacccacctcagtctcccacctaactgggactacaggtgtgtgccaccatgcccagctaatttaaaaaatttttttgtagaggtgagttctcactctgttgcccaggctggtctcaaactcctggcctcaagcaaccctcccacctctgccttccaaagcactgggattacaggtgagccactgagcctggccccatatatatatgttttctcaagtttagaataagctcccaaaatttagaccataaaatctgagcctgtcttaggcctgtgccacacaagccaaactgcttttacaattcatacacccattcaagcaatgatgaaaatgcctgtttcactacatcctcaccagtaccgggttttatccatttacaaatctgcagtgacttcgaggagtgccaaaccatggcagattcttattgtttttccacctttctttggtctctgtaaggctgaaccttttaaatatgtttgctcatcaggctgtccctggggaatgttctagagcagaacatcaagttgacccctatggaaaaaggggtcccttcatgtagaggggcagaaatttagttgtgttgtagcctacagttatgcagaaagcagaatttgcaagcagtgcacttggatatgtagcctaggggaatttccagcaaagtgttgaaagcgcagcctggtttcttctctctgcttgttataaaatgtgagaggaaatagacagattgagggaagaagtgtgaagtaaaaaggaaccaggacttgatgatctgggaaattctaagcccattcagatcacaaaagatgctaaaattagatgctcccgaccatcaccacttctcagctccgtgacctcaggcaagtgtctaaacctctctgagattcagtttcctcatctgtgaaatgggctcgatggtaatagcagccacttcagagggctgcggtgaggggtgagtagcttcatgtcaagcacttcacgcaatgccaggcagttgcagggttcgtagggaaagtaatgggtgagaggcgctacaccagtgctccactgtctctacgcccctcattacttcctggctgctatcaacccatccctcccctcccctcctcacccccaggtacctaattcccagaggcaggggagcgggtgaggattcaagctgcggattagcagaggccgattagagacgggtgggaggggggagggagggggggggtctctaacccactaacccttcccttgccggtcctgcctcaggtttgcgggaggggtgggggcctgcaaaacctcggtgcctgccacacccttggagaaagcattagtgtccctgctggttgaccccaggttgacccctctctgggcctcattggttccttctgaactatggggcgaagactgcagaaatgaaatgggaaagcctcagcgtctgaagatgagggcacagggtaaatgcctcagggctggctgagacatccttcgcgtagacaacacttactgagcacctaccatgtgggcagagctgctggcatcaacgtcgcctagaactgctcagctcccagagtgccagactcaacttccagaacccccagactcagccatcgctccgaaggggcgctccgggaactgattctcctcccggggtgccacctgctctcaccctcaccctggcgtcctccctgggggagcagggaaccactcctccaaaggggtccctgaaatcctggatcctcagtgtgtgtggaggggggtggaactggggaaagacagaaggaccatagcagaacccctttcacccgtcaggtcggagcaacactccccccacaccccctgcaacctcccccagctgcgccagacgcagagccggtgggggcgagggggcggcgcctactctgcggctgtcagaggagggggactgcgggagagcgcttgggggggcgctgcggcagccggtcccaacccgcagcggctcgcgcggcaggggcgggggcgctgacccacctcggcccggcccctcctccgctgcggaggcctcgccattaatcctgaccgggggagggggcgcccgctgccccccacttcctacgggggccgctgcgagcgctcccctgccgccccctgcctggagcccctgcgggacccccaggggacccccgccccaggtctgtcgccctcggtgtcggagtctctgtctgtgtccccgtctgtcccgtctccctgctgtgcgtgtgtgtagccgcgtgtcccccggacacctgcagtcaccggccagggctgctcggggaggggtcccgggggtcggcgcgtgagtccctctgaggtctgggtgtctttctgggactgtgcgtctgtgagatctcggggtgccagccccacaggctgcgagtgtgcgtctgtgttgacctcctgcagaaggtgtgtgtcccagatgccccaccggcttcgagcatgggtccccgtgtgcccggcggacacccacgggccgtgtgtccgtcacacgctgtaggcgccgcgcgtggggatctctgcgcgtgtccgtgtgcggtgtgtgtgtgtccgtggctgagtcgaggaggcccggcccgccggtgtccccgagtcgcctgcgcgtgagtgtgtgtgtgcgcgtgtgtgtgcgcgcgcgccgcggcgaaggtggatccgctcgctccgcagcgagcccagccggggccccgcgacctgcagccgccgccgccaccgcctccgccgctccccgggcctccccttgcgcgggccgggccggggatggagccgcagccggagccgccgcagccggggccgcggcgcggagcagcctgaggcgcgggcggtgcgcgggaccggggggagggcgggccgaggggagggtcctgcgggccgggggggcgggcgcggcgcgccccctccctggcgcgctcgctccctcccccgcgcgccctccctcgccgcctcctcccgccgcctgcggcccccccctcgccggggaccgagcgcgctcgctccggcgccggcctcgcctcctcgcagcagcgccatggtacgtcgccgcacccactttcgttttcgcccggggactttttggggtggtgcgtgggctccgggcgaaagttgcaagatctggggggacagggggcgggggccgcccggaggaggggctcgaggcggggacccccactcgccagtcgccacgggacccctacccacgatccccccccgcaccccggctgggggcggagctggcgcgcggggcgccgcgggagaccccaagtggggggcccctcgcgggcgccgcgagttggcgaggagggcggggctccccggagaaggcccccgcaaccccaggccgggcccccgccccctccccgggccagaccccaggcgggagggcgcggccctgggcgcacgacccccgagcgcgcagtccgtgggggagcccgggccagggagggggcgcacggcgggacggcgcgtggggcgggggtcgcggcggcccccgcggggtgccccggcccgggcgagcgcggcgcgccagctagcggaaaatggccgctgcggagaggggcggagagcgcgccgcggccgccgccgggcgccttgaacttggagccgggcgggcggccgcgctcggcgccgcgcaggagcagccgccccgcctgccctcgcaccgcccccgccccgcccctcggcagacccccggccccgctgccgcgcgcgcggggtccccagctgggagggacccccgggtctcggcccggcgcgccccaggccctggagcggcggtggctgcacttggggttccggtgtccggtcgactggcgtcggtgtcgtgcgcacctcgaggggtgcgtgggagcccctgcgctccgtaacgggccggcattggcatctgggggagcgtctggggtgtgcgcggcggggtggtagtgtacctgccttggggccgcgggtcccggcgcgtcggctccgccgctttctgtgtccgcgtgtgtctgcacatccacgtgctggcgcgtgttgtgttgtgagcgccgcccgcattgtgcggctgcgggacacttgtgtctttggataactgggcgactgtgcgcgcgtccctgcgggacggtgttgtgaaactatggctgggctgcgtgtccgcggagccgcgtgtccctgggtgaccgtggggtgtccccgtgtgggtgtgtggcggttggggggggtcgccagggagtggagaactgtcgagtggccgcgttccaggggacagttgggtgccgcttgctgtgtgcgagtgactggcgctgagcctccccctagggaagggtctgccttccactcccggcctcgcctcccccagttccttttttcctgtaactggggactgcctgggcggcggaggaagagcgctccctccaccttttcaaaactctgtccctttatctttcccctacgtcccctccacttcccccagccttcggggtcccccatccgcttggcccgagggggtcctggctggaggttcgggcgcgaggtggcgccgggacgcgatcactcggcacgcagacgtcgctcgccaggggttgcgcttgcgcggggacctgccccgagaggggcggggcggcaggggttccccctccctgagaggccgtggaagtcccgaggggtgggtggttacagcagcacaggggttaggacgggcccgggaggtggctaaggagacccctattatcctatgctggggagagcgtaggggcaccgggactggtcccgcagtcccgcctccagcacttgcccccaatggaccagaggccgtgggcacagagagctgttttgtcacctccagggaaatccccgccgctctccacccccaccccacccccagtgcgtttgatataattttctaaatataaaaagcccaaggccaggctggtctctctcgctttcttcttgacatcccatcatggggggctgtttgggatgtcaagaaggagagaaaaccctcccacaatgacacagaggcctcccccaacaacactcaaggtcattctcgggttgtcaccatccctcacacccactcccagcctcagactcacagctatctccctccgcactcccggagggacggttggatgccctggccttcagcacacggcatggccctctgtccccattttgggttctgtgcacagtgggacacacgtgcatgcagtcatagttacacacacacacacacgacactccctcacggtgcctgtgtctgcatgactctgcacacacaaccacacagagactcacatagacacacacaggcctgtctagagacagacgtcacacacacaggcgtgcacagacacacatgggcagacacactcacggacacaaacaccgcacttgcggggggatagacaaccacatctcaccctcctgcccttccctgtccccaccgcgtttctgcagggccgagagcccagctccaggcagagctggtgcaggaggagcagggaggtggcgtgctgtgtgtcattgtgatggtgcgtatgtgactctgtgtgtgcctgtatgggaataccggggggttccacttgtgggtgtgtgtgtgcttgtaagagtgtgtgcttttgtgtggagtgtgtctgtgattgtggacaagtgcccatgtgtttgtggttgtgtctgcacttgtgtgggggcagctatatccatgcgttgtgcttgtcaagaagcgtcctgtggggagttgggagggtgtgtttgtggctgtgtgtgtgccatgtgggtctgtgtgtgtgtgtgtgtgtctctgctcgcccctctttgaggaggtatctgaggtcaggtgtggggggaaggctgtgatgatatatgggtctgtttttatgtgagtctgtgcgtgtatttgtgtctttgtgtatgtagctgtgtgtcgtgtggagtctgtgtctgcagctgcttgagtctgcacgatgtgtgtctgtgtgtctctgtaggtcgtagtgtgtggtgtgtgtgtctatctgtaccagcctcaacggcctatctgacctttaactcacttgactttaacatcccttcttacagcctcagtttctcatctgtaaaatgggaccacatgggacccttgcaaggttcctggggagctgacattgtgagccccttgctgagcaggtgcggggctaggggaggctgactgcacactgcactgctgtgtaatcatttgcctgcaagattatgtcctttattctctgggtgtggtggctgtggggttaccatggggggctgggggttcctgtctaccctgcctgagctgctctgtgaattgcattcaactttttaagttttcctttaattactgaagccattagtgatcatatgaagaggatacaactgtatccagaggaaaaaaaatccaatctttctgatcacccccattcctgggtggaaccccgctccagaatgttaccatctatagttggagcatttgcaggactgagaaatacacacttatagaggatacatgtgcatatgtgtatatttccataaaggatgtacttgtggaaatactcgtgtatttccataaaggagacatatgtatatgtatgtgtatgtgtgtgtatatatatatatatatatatatatatattttttttttttttttttttgagatggagtttcgctctgttgcccaggctggagtgcaatggcatgatcctggctcactgcaacctccacctcccgagttcaagcgaacctccagcctcagcctcccgagtagctgacattacaggcaccctcgcccatgcccggctaatttttgtaattttagtagagacggggtttcgccatgttggccaggctgattttaaactcctgacctcaagtgatctgcctgcctcggcctcccaaagtgttgggattacaggcgtgagccactacaaccggccaaaggagatatgtgtgtgtgtgggtgtgtgtgcatgtgtgtgtatgtaaaggatactatgtatatttgtataaatacatgtgtactctttaaaaccctaaatgagatcttgaatttccttgctgggtctacagcagtggggtctcagccagggttgattctgttcccatgggacacttagccatgtctaaggacatttgtggttgtcacgactggggggtgcccctggcatggagtgggtggaggccatggactctgctcagcaccctgcagggcccaggacggccccaacccagagagcgatccagccccagtgtccacagtgccaagggggagagctctccagctttctgtccccccacttgtctcttggggacataaccagttgggagccactggttttactcagctgcatagtgtcccagcctgtgttgggattactaaaccggtcccccacagatggacagcatggctgcctccaaattgtgggcattagttttataggtggcagtcaactcttttgtgctcctgtatctgggacagttacagagatgccgaagagtgaaataactgtagagagagtgctttgaaaaaaaaaaaaaatgagccagattgtgctcgaaagtgccaggagctaaatcatgcacccatcttccgggccctccacatgcaggtcccaatctaccaattgcctttttaaagaaactatgacgtacagttccctgttgtaaccacgggcaggtatttgctgacttgcctacaacctggagggttatgagctggcgtcgccccatttcacagagggagagccgaggtgcagagagacgaagctgctgactggaggagacatagacccaagcagcgagcccacgcggcaatttagggaaccaactgtgtgtgctgcgggggtcccttgccacccaaactgggatataggctgctgttcgtacacttgcagaagtttctccctgcagctaccgccaccaataatattcacacagccttcccacatgctatgtaaagactccaaccttccccacctcccaagatgcatcctgttactatagccattttacagatgaggaaaccgaggttccaagaggggcagtctctgctctctaaacttcaccttccaaaggattctaagctgctgaatgaaggctgcaggcagggtggtctgtacaggggagggagggtggaaggcacggggtctggaagtctaggaggagtgtctgaagtcaactgcaacttttaaatatctgtgaattttagatttcaccctgtatgtgtccctagcgtgttttaataaaataaattgcttcacgttatattggtatgtggatttccagatacacttctcaccatttaattcaaatgctccccacagctgcacagtgggtttaaaatacacagacacacacatttatggaccgttcgtgatgtactaagcactgtttgaataatgtcaccgtcatgcagaggggagcctgtggggggcctagggaacctacgctgcaggaattctgctccctcctagtttacctgtcagaccctgggcaagtggcttccgttctctgggcctcagtttcctctcctgtaatgcctgaggataatgggtgctggtatcttctgcgcccctgggcctggggcacctgccccagcttggtgagagggtatcatttgtccttgggaagctcagagagatgaggtgaaatggccaagctttctaagaatgtgtctttagtgaacatttgacccaaggtcaaggctctgctaaggtcattgtccttatccccagcaatcccacaggatgggcatctttaagccactttataggggagaacccttgggatgggaatgagagacacagcagcctctgagctagcctgggaggatccagggagtgaaccgggggagggttggggccctgtcatcagatgccctgggggctcagacggaggcaggccaggtctctgccctgttacgtctagaaggagaacagaatgtgggctccaggtccagatggcctggctccaagccacacttgccatacctcagtcttgagatctgtgaaaagggcacacccctgaggcaggtggaaattattggatacccagggggaggctgcaagggtttatctggccagctggagatcccgcctggacaccgtcctcctggggtgctggagagacacacaggcgaggccacccctcccctgccccttgggtgctgggtgaagagagcaaattctggagcctcccgtgttagcctgggcccttctggccaaggaagggacagctgcacacaagcccctctagctggggacccgcagcccctgcctggctctggggggagaagggagccagggtgctgtgggaccagctcaccgtgcacccagggtcgtacatctttaaggggaaagaggcgcgctggccggcctctgcgcacgtcacttcttcattccttccctcccccctggctctttcctccaacttcccggccagctcgggggtgatgggggggtggggagggggggccttaaaaatccacccctggcccctcaatgtccagaaacaaccctgtcccccctctccgcttgatccgaattggggtcgccctgcagtcctggggtcctggtctagtgccctggggcattgcgtaaatacgggaggagcgggggggtcctgagacgtcgggggaggctctcctttctcgctcgcgcccttttttccctcgtttctttgaaagttgggtgttgagaagtgggaggttcggggtgggagggggagggtgtcagagggtagagagagagacagagagacagagacgggggagagaggaagagagagacggagggagagagggacagagagcgaggcgggcggcgcgagagagggagagcaggagggaggaggagggagaccgagggaggaggcggcgaggagagcgcgccggccgcggggcgggggggggggttggggggggcgggggggtggtttggaaaaatgactcagtaagttcagcgcgcccgctccggccggccctgcgcctcccgccgcgcccgggatgtattcgtccccgctctgcctcacccaggtacggtcctcgcccggccccccgccggcgcccccgcgccccccgcatcccagccccggagttttgaagcaggaggaggcgggacgaaaaaggcgcgcgtccctcccgccatccctgcccgggatgccccccgcgccgagggctggggtccggtggggggatgggtcaggctggggtaccccccccacacccttacctaccgcggaccccctacgcgggactcccgcccagcacccccaaccccgactctcgggacctctcccggatgtggggcttggtctgcagatttgcgtcccccccccacacaccgacgcactccgcacccccgccccgacactcggaaaggtcggggtgggggctggcccccctccagcaagggctctgcgggaagccccccgcctgcctctgagaggaatctagggggtcgtgattggaccctgggtctccccagctggagagaaagggacctctcatgtgttttccccgtgtccccccaccaaggttgtgcgggccgccctggccctcggtcgcctttccctcgttattggcccacgtgtgcatggagggggagggggcaggagaagttggaggcccaggagggggaagggtgctccggcggcccggctgggtcccccctcctttgcaagccccccagcaccgtcccggtattttcgctgcatcgattctggattctggattctggattctggagccgccgccgggaggagcgggaggcccggcgctccgggtctggcccgggcactgcggcgctgcggacgccctcgccagcccggcacctgccccgtcccctccccctccccctccccctcccgtagcctctcacccctggccgcactcccagactgccccggggccgagccttgtgcaatggccgagggggtgtgtggggagggggcggctccccccggggactccttccagcccaggctcccggggaccccgaggtctgcaagttccgttttctagaccgctgctttcctccttacgcagtgtgtctttaggctggagaggttctggcctcagtttcccctgaagtgaggtgcggctaaggccggttctggagaggggacagtatggcgggcaaactgtaaagtcccggcacgtggggggtgcgattccagcgagggccaggcccgtcttaagaagcactgtgtggggagtatatgagtccccggcttccgctccagggcatggtgcagtgagggaccccccacgccaggcatgctccttggtagggtctttctcaccggccccctgcagccgacagggaatgtgggagctggtgctgagggggtctgaggtctgtcctacctgtgatcccctgagtgaccttgggtaagtccctgtcccagcctcagtttccctttctgagcagctttggggggggggttcccgaagaaggcatctctttgaagttctccaagaacaactagggttcgagtgggcacgctgtgtgacctcgggcagcctttgaagtctctgggcttgtggggtgactgaggtgtccccgctctgtcctcaccagctggaaggagccatttgggagggctgagcggaggggaggctgttccaggctggggaggttggaaggctgcctgtgcaccctggaattcccccatcagggctggttgggagacatcctggttgctggggtgggttgggggttagtaagaaccccagtccaggctttgcctcagagaattgctaactcggcctcagtttctccaggaacagggcaaggaccagccaggagggctgtctgtggaaaccaaaaaacggagaggctaaaaactaaaaactatccaggggtgctgcgtgcaagagacagagatgagaagacagagacaggcagagagacagaggcagagagctcccaggccagagtggggacagcgagtcccaagtgcagggggctccctcctcccctgcgattctcctctctgccccgccctccaccccagccctgtagtggagctggggaccccctttccagtttgtcttcagcctgaatgtaatccccactgttcccccaaggcccagcctggtctggggtagccagtggggtgggctgggggactcagaaggaccctgagtgccccatgcaggagcctcccacccaagtcctggctgcctgactcagtttcccgaatcacgtcccctccgtttctctcatcttggtctctttttgtctgtctttctctctttctctctgtcttgctctgactctgtgtgtgtgtgtgtgtgtgtgtgtgtgtgtgtgtctgtttctccctgtctctccatctctgtctctccccgcctctgtttcactcccagtcactgttggtctctttgtgtctctctttctcatcctctgtctctctgatgtctcagtctctcccactgtctctgtctcttcatgtctatctcaccatccctttctcctctttgtctctgcatgtctctttgatgtgtctctgtctctctgtctctccctccctttgccttctttgtgtgtctgtccgatgtgtctctgtctgtttctctgtctctgtctctctgcccccttcctctctgtctctgtttctctccaatatgtctgtctgtctcttcatctctgtctcaccttccctttctcctctgtctctgcgtgtctccccttgccccctctctccctgtctctctctatctctgcatgtgtctccttactcctctctctctgtctctctctgtctctgggcctccctctcccccttttcccagctaattttacaacctgagcccaaccgaaaatagctcccttttagctgatccgacccggatccttctcgggagccgaggctggcggggggtggggggcatctcggtgccagcccgctctgtgccacccgggcccggcccgccgagtggggagtgggtgctggcggccctggggcattctgggagccccgggccgggctcagcggtgactcaagcgctttttcacttttactcttaagaggaactgtgtggagcccatggctcccataaatcctgccggcgggaaggccggcctccccgcgcctgctctgggcctccctccctgcctccctcccgctggcgccaccgccacgttagttattccgggtttggggccaagtccctcttggccgcagcgtggcggattccccgagccacctccatcccgccaccgggtccctgtctcattcgttcgttgtttccttcattcgttcgtcccatgccctctcggagcacaatgtgctttgctgccatttctccagcagggtaaccgaggctgggagaggctgtcctcccaccccagacccccgacctttgttggattttctagatcttccttaagcatctcctgggccctggggataggtgggggtgggggaggcagcagggcccaggcccagtgtaggttcttagagggagcttggggggtgcctaccaggagcagggggcctgcagcccctcagtgccgggagaggggctaagagtcagagagggccagggcctgcccgaggtggcacagtggggctggcagagctggggttcaggccattttccatctggcggcttgggcaggtgggcgctctctccccgtgtgccccccacccggggcctggtggcctctgattcactctctacaaggctccaccactctcccgctgtatctccctctgggtctctctgtgcatctctctctgtttctccccctcccctctctgcggcggaggtgcctctgcgcgccagggccaagcgccctgtaaatcaccaaagctgggattctggcagagtcagcgttctcctctctctctctctctctctctgtctccctccctttctccccccatctcgctctctcctcctctctccctctctccttctctgtctccctttccgtctttccctcttcctttctctctctctccccgtctcccttctctccctctctccttctctcttctctctctctttctccctccctacctccctctctgttcctcttctttctctctgtctgtctctttctttctccctcccttcctctctctctgttcctcctcttctttctctctctctgtctctctgagctggcctccctccctgtctcacaccaaatggatgggaaatgctgcctgggcctcctgccccggacacggcccgccccccactctcctgcctgtgtccacgccgacctcacctgggtgcccatctgccctgagcacacagcgtgcgggcacccaagtcctgaccagttcacatccatgagcacacgctgggcgcacacgcgtgcacactccctgacacccatacggacgaggacacagctctgcctgcctcggatctgccttgatgggggtcaccaacacacagacctagagtgcccctcacatctgcctgaaaatcttgctcaggaggtgccaaacccaatatagtacctggtatagagaaggtgccaaataactgctatagagtggtgccaaataagtgttgctgtgcttgtgattgttgctaaactaattctcctctttcctgactctggtgggtgacctgcccccacccccggaccgtttcttgccctgaaatgaagtcagcagaaacccccacttcctcagggctgctgcagattcagggaggcagcacaatttttttttttttttttttttgaggtagagtctcgctctgtcgcccaggctggagtgcagcggtgcgatcttggctcactgcagcctccggggaggcaggacatttctgaggtccacagtgcagggcttggtactcagtaggtgcccaataaatacctgttgcacgaatgaatgaatgaatgaatgaatgaatgaatgtttttggttgagaggcgggactttggtcttcccgagcctccatttctccgccaacataaaataaaaaacataatggcactttcctcagagacatcgatgtaccttagtccgacacctggtatacagtaggtgccaaataagtgctgctgtgcttatggttgttgctaaactagtaattgcattgaacaccccagaggcattttccagtttccctcccttccctctgtgtgtatttgcgcagcgtaagcccagctttgggctgggtgacaaggacagtggtgacctggaaaggcccaggctcagacccctctctactgtggcatttctgttagtttttcttttctttcttttttctttctctctccttccttccttccttccttccttccttccttccttccttccttccttccttccttccctccctccctccctccttccttctttccttctctttctctctctctccctctctctccctctctctctctctctctctctctctctctctctctctctctctcggagtcttgcactgtcgcccaggctggagtgcagtggcgtgatctcagctcactgcaacctccgcctcctgggttcacgcgattctcctacctcagcctcccaagtagctggaattacaggcacgtgccaccacgcctggctaacttttgtatttttagtagagacggggtttcaccatgttggccaggctggtctcaaactcctgacctcaggtgatccacctgcctcggcctcccaaagtgctgggattacaggcatgagccaccgtgcccggcctctgttagtcttttctccctgcccagccctgtccagggtctccctgagtttgaccagccctgtgtgggtaccagccttccttacacatgggggtgcatggataaggggggtcccagaggcagaagatgggagcattgcttcagtggtctggatgctggagatgctaacagatcaaagctgtgcccttgtgggaccgacagtctaggccgggtcggggacgggcaggaaacgaggtgaccaggactccttgaggatgtggtgtgcgaccgacctcggggatcaaacaaggggaagggaaccacgtgggactcggagagtgtgcacggtgcagaccaggtgtcactggacgctctggcccgagactgtttgctcaaggggcccaggagtggggtgggggggtgccaggaggcccagggaccagtcccagctcagttcctccctgactgtgtgactttggtggaagatttcatgcctcagtctcctcctcgaggtagtgggtgcaatgatagtccccactttcatagtagactttttttttttttgaaacagagtctcgctctgtcgcccagactagagtgcagtagcacaatctgggctcactgcaacctccgcctcccgggttcaagcgattttcccgcctcagcttcccaagtagatgggattgcaggtgtgtgtcaccgcacctggctaattttggtgtttttagtagagatggggtttcaccatgttggccaggctggtcttgaactcctgacctcaggtgatccgcccgcctcggcctcccaaagtgctgggattacaggtgtgagccaccgcgcccggcccctatttcgtagtagacgtgatagctcagcaaacgctcagcctgtaagaggcacagcctcgctccctgcctctctcctccacctcctggcccctctggctcagccctcattgtcctcccagaacatcaaggcacagagggaagtaggggacccagggttcattttgctgactcactgccttggcagagagtttgaaccctgtggactcagtttacccaaattcctcactgtggcccacaaggccctgcccagcctgtccttgtcccctcctcaaccctcccctcctctctctttcccccttgctcattctgctccagccacatgggcctcctcgctgttcctctaacacgccaggtgcggtcctgccccagggcctttgcatgacccatttctccatcagaaagctcctggcctggagtgccatctctcaagactttgttcaggtgtctcctcctgcaagagaccttcctggaccccccccccaagctaaaaaacaccccccaccccagagattctctggtccctcaaactcttaaatttcttcagagcactttgcccaacttgacgttttattacatattttgctgattttaaccatccgtccctgccccagatctggatccaggtgagggccgagcccaggtccctgccaagtcctcggcaccctacctgggaccggcatgcagcaggcactcactaaatgtttgctgagcaacagaatgaatcttccctctctgggagccgttcacatgtccacaggctgtgattttctgagccaggggaaggagcggcccaaggttagagcctgacgctggtgccggatgggcctggggttgtccgtgggaccatggacaagtcatccgacccggagaagaaggcattagaactaaggctttgaaggatgcgtaggaatttgggataagtgctaagtaggtaatgagctagattctcatgaaggattgttgagtcacttttacctggaaacttttggtttggaaattggagtttcttgtcctggtttgctggcctggactttcagggtgggaggagcacagggaggtgagtgagggcatcacccagtgcatggcgtggtcgttcagcaaggtcttgggtccagatgtctctcccagctgctgctgctctctttggccaggaagtcccagtgggctaagctggggtttccaggaaagacctagccttgttccccttctccccatcaccttgcaaggaacaaggtcaccaggcaagctcccctgtctccagcaggctgcaatattcctttctgcccattgtacagaatgagagactgaggcttatctgaggtgatctgttccccagccattcagatggtgaaaatagaccttactgtcacccagccaccttctccgacagtgggtgcctcaactctgggcctcaggattggagagggagaggtgatagaactggatggtcctggctagatctgggaaaccctgggttgaggaggaaaggctgcttgaaggaggggacactagagatagggcgttgagggatgtgtaggagtttgggaggattttcagcatctagcttgtcttggttatctcttttgccggttgggcctctgagggcagtaggaggtccctggggaagaggccctggttattgcaggtcatgtgggagaaacagagtgacaaccggccaaccaggccctgcctctcacgtggtctgatcccctggggaggacaagggaggatggggcagcaggtccatgacccagttacaagctgtttgtcttcctgcctctgtaactagccggggtcaccactgacgtgggcccccacccctgcccgcctccctggcacctgtccccggaaagggcacagagaaggggaggaacatagagaagggagggacagttagggaggaggaagggaactcagatctacgaggggccagatgagaaaaggaattaagaggagaggggaagtggggagggggaattcagagagagaggggggttggggagagaaggagttggggggacagtgatccctgcccccatcatggatgcctcccctgtcccttccagcagcctcttatcacagccccagtaagcgccagagcttgggtggcagccacggccccagctggacaacattgtccgggcctcctgcccgcctggcatctcctccacaggcaggtcctgcgcctctatgggtcctctctgccgcgtcccactgtgccccccaccacccccactgcccggcttccctggccagaccatctgggctctggtcccagctctgctgaccggctgtgtgaccctggacaaaccactccccatctctgggtctcatccagtcaggggcagggacgagattggacagggcctgggccgggccccctccacctcccctttgccttagcaggttggctggggaagcgggggcagcggaaaagggccctgaggtccggtccccgccgcagctgttacggtgactcacgctttgggggacattggggtgggggagcttcgctggtacaagctgactctggtctcactgggtggggaggctattttcagagcctcagtaataggtgaaatctgatgtcctgcccctccccccgaagcaccccacggccggaggtggcccaaggggacgtggagcacagagcagggagggtgatctggcagcagctgctctgcccatcccggcctggaaatgggaccgagtccagccacatccgctggcacacacagtgggagtccagggtcaacgtctccctaccttcctgagaccccaatcttacagagaacaggctgttctgagaaagggacccgtggccttccagggggtcagggccctgattcttatcctcacaccggccctgagaccctgtgggacctcagccaggtctccgcccctctctgagccttagtttccatgccacagaacacggagcggggcctcaggctgttccctgcttcctggaagattgtctgcaatcaaaatgatcatcgcagcaatcgcgtccatagtaatgaaaataccccagcatcttagaggggccgaggcgggaggatcgcttgagcccaggaattcgagaccagcctgggcaacatagcaagacccccatctctactaaaagtacaaaaattagctgggcatggtggcgcacctggaatcccagctactcgggaggctgagacatgagaatcgcctgaacccaggaggcggaggttgcagtgagctgagatcatgccaccgccctccagcctgggcaacagtgtgagacactgtctcaaaaaaaaaaaaaaaaaaaaaaaaaaaaaaaggaaagaaaatagaaaatatcccagtgccttaggaggccgaggtgggaggatcacttgagcccaggagtttgagaccggccaaggcaacacagtgagtgagactccatctctgcaaaaataaaaattagccagacatggtggtttgcacctgtagtcccagctactcaggaagctgacgtgggagaatcgcttgagtctgggagttcagggcccaagtgacctaagatcgtgccactgcactccagtgagacgcctgtcttttttatttatttatttatttattttgagacggagtctcgctcttgttgcccaggctggagtgcaatggcgcgaccttggctcactgcaacctctgcctcccgggttcaagtgattctcctgccttagcctcccgagtagctgggattacaggcgcctgtcaccatacctggctaattttttgtgtttttagtagagatggggtttcgccatgttggccaggctgatctcaaactcctgacctcagatgatccacccacctcggcctcccaaagtgctgggattacaggcgtgagccaccacaccaggctgagacccccatctcttaaaaaaaaaagtaataaaaatcacagtagccccagcactttgggaggccgaggcaggcggatcacgaggtcaggacattgagaccatcctggctaacacagtgaacccccgtctctactaaaaaaaaaaatacaaaaaattagttgggcatggtggcgggtgcctgtagtcccagctattcaggaggctgaggcaggagaatggcgtgaacccgggaggtagagtttgcagtgagctgagatcgcatcactgcactctagcctgggtgacagagcgagactctgtctcaaaaaaaaaaaaaaaaaaaaaaaatccaatagcaatataagttgtaatgataacaatcatcgcatcattaataacaatgtagtcctttgagagctggggggaggaaaacagctttctgtgctaggaagggatcacccctgtccgaaatgcccagcccagcctggtcaaggcagggagatggaaaggcagttttgcttctctttctcttcttgttccttgtatttattccaccttgaggctgagaaactaggtcccagatgtttttaatttgttttattttattttttatttttttagagacagggtcttactctatcccccaggctggagtgcagtggcacaatcacagctcactgcagcctcgacctctgaggctcaagtgatcctcccacctcagcctcctaagtagctaggactacaggtgtgcgccacagcaactatgcccaactaattatttttgtaatttttagtagagacggggtttcgacatgttggtcaggctgctctcaaacacttgggctcaagtgatctctccacctcggcctcccaagtagctgggactacagacgcgcaccacaaaaattatgcccagctaatttttgtaattttcgtaaagatagggttttgcctgccggccacagtggctcacacctgtaatcccagcactttgggaggcagaggcaggtggaccacctgaggtcaggagttcaagaccagcctggccaacatggtgaaaccccatctctactaaaaatacaaaaattagctgggcatgatagtgtgtggctgtaatagtgtgtgcctgtaatcccagctactcgggaggctgaggcaggagaatctcttgaacctgggaggcggaggttgcagtgagccgagattgtgccactgcactccagcctgggtgacaagagtgaaactctgtctcaaaaaaaaaaaaaaaaaaaaggagatggggtttcgccatgttgcccaggctgggattgaactgggctcaagtgatccacccacctcagcctcccaaagttctgggattacaggcgttagccatagtccccagctgagatcccaaatgctatgcagactcagtttcccttgctggaaaatgggaagaatgggaggggcctccccacacccagacagggagctgggggcctcccactgccccacatttctcttcaaggggctgctgttattttcgtggggaagtcagatgagtgcaggttccagtccacctctgtcccccatggccgggttccccctcaaggcctcagtttcctcatctgtagcatgggtgttgtgactgccctcagacaccaatttgtcatgatttgggagtaggttgaagtcccagctctggcccagtctcagcgccttcccagccctcggattttccatctccagggtgggtctgcagggaacggggtggcccctctccccagttctgaacctttgtggctgagcgtctgcttctctggtctgtttctgtatcagcacagtgggttcatggaaaggggaaaggagggagaggactccacccgggatttctcctccctctgattaatcctggtgcacttgaatctcttatcttttgatgcagaaatccccccacccttccagcagccctcaacctccaggcgggcctagtgtctgcctgtggatctcagccaggcctgtctgtacatatgctctgtaggaacaagctttcgtagtcattttttgtttttttgttttttgttttcccaagatggagtctcgccctgtcacccaggctggagtacagtggagtgaccttggctcactgcaacctccacctcccaggttcaagcaattctcctgcctcagcctcccaagtagctgggattacagtcatgcgccaccacgcctggctaatttttgtatttttagtagagacagagtttcaccatgttagccaggctggtcttgaactcctgacttcttgatctgcccgcctcggtctcccaaagtgctaggattacaggcatgaaccaccgcgcccagccgggttttttttttttgagacggagtctcactctgtcgcccaggctggaatgtagtggcgagctctcggctcactgcaacctctgcctcctgggttctcctgcctcagcctcctgagtagccgggactacaggcgtgtgccaccatgcccagctaatttttgtatttttagtaaagatggggtttcactatgttggccaggctggtgtcaagctcttgacctcaagcgatccacctgcctcagcctcccaaagtgctgggattacaggcgtgagccactgcgcccagcctcatttttcatttttttttatttctttctttttttttttttttttttttttgagtcaggagtcaggggtctcactacgttgtcacccgggctggagatcaatggcgcaaccttggctcactgcagccttgacctcctgggctcaattgatcttcccacctcagcctcccaagtagttgggactgcaggtatgcatcacctagctaagttttgattttgtagaaacggggcctcgctatgtcatccaggctggtcttgaactcctgggctcaagcagtccacccactgtggcctcccaaagtgctgggattacaggtgtgagccaccatgcttggccgccgaccctagtttttttttgttttgttttgttttttgagatggagtcttgctctgtcgcccaggctggagtgcagtggcgcaatctcggctcactgcaagctccgcctcccgggttcatgccaatctcctgcctcagcctcctgagtagctgggactacaggcgcccgacaccacgcccggctaatttttttgtttttttttcagtagagacggggtttcactgtgttagccaggatggtctcaatctcctgacctcgtgatctgcccgccttggcctcccaaagtgctgggattacaagcgtgagccaccgtgcccagccttgttctttttttttttttttttttttttttgagacagtgtttcactcttggcacccaggctcccaggctggagtgcagtggcacaatctgagctcactgcaacctctgcctcccaggttcaagcgattctcctgtctcagcctcctgagtagctgggattacaggtgtgctccaatatgcctggctacatttttttgtatttttagtagggacggggttttgccatgttggccgggctggtctcaagctcctaacctcaggtgatccacctgcttcggtctcccaaagtgctgggattacaggtgtgagccactgcgcccaggctttttttttttttttttttttttgtgacagtcttgctctgtcgcccaggctggagtgcagtggcaccatcacagctcactgcagcattaaactcctgggctcaaatgatcctcccaccccagcctcccaactagctgggactacagttgcaaaccaccatacctggctaatttttgtttttttgattttgtttgttcatttgttttgtagcgatggggttttaccatatggctcagactggtctcaaacttctgggctcaagcagtcctccctcctcggcctcccgaagcgctgggattacaagtgtgagccattacacccagcccaaccctagctgcaataggcagagaataggtccctgacatctttgttctcccaacctcagttttacccgtctgtacaatgggttgtccatgagcctccacctggcccccttagcttgctccatctgcatgctggggttcaacataggtcctccacggctgggcatggtggctcacacctgtcatcccagcacttggggaggccgagagccgaggcgggcggatcagaggtcaggagatcgagaccatcctggccaacatggtgaaaccccatctttcctaaaaatacaaaaattagctgggcgtggtggtgggcatctgtaatcctagctactcgggaggctgaggcaggagaatcgcttgaacccgggaggtggaggttgcagtgggccgagattgcgccactgcactccagccttagcgttaagagcaagactccgtctcaaaaaaaaaaaaaaaaaaaatgatcctccacaaacttccgccttgatttgtgcctctcacatagtccaagtctgtttgctcatctgggcgatgggttcttgcaggtccctgataaacttctcctgggtcccccgggccttttgcgtgcctccggcggcgtgcacgggtccgcagcgaccccctgcccacctctgcccagcccctcccactctgcgggtctgttcagggcccctccgacctcagccttcggggccgggcagtgggtccgccctctgcgtccctggcgctcctgacctctcgcctctccggcctgcaggatgagttccacccgttcatcgaggccctgctgcctcacgtccgcgccttcgcctacacctggttcaacctgcaggcgcggaagcgcaagtacttcaagaagcacgagaagcggatgtcgaaggacgaggagcgtgcggtcaaggacgagctgctgggcgagaagcccgaggtcaagcagaagtgggcgtcgcggctgctggccaagctgcgcaaggacatccggcccgagtgccgcgaggacttcgtgctgagcatcaccggcaagaaggcgccgggctgcgtgctctccaaccccgaccagaagggcaagatgcggcgcatcgactgtctccggcaggcggacaaggtgtggcggctggacctggtcatggtcatcctgttcaagggcatcccgctggagagcaccgacggcgagcgcctggtcaaggctgcgcagtgcggtcacccggtcctgtgcgtgcagccgcaccacattggcgtggccgtcaaggagctggacctctacctggcctacttcgtgcgtgagcgaggtgaggtgtggtggcctgagcggagcggccagcggggagggtgtctgatggtggtgacacggggccaggagggcctgagggaggaggccagtgcgtgtgggtatgatgtggtggtctgagaggggaagtgggccttggagagtgcccaatgggggcgacacggggcacggagcatctgagggaggaggctggtgggtatagatgtgatgtggtggtctgagaggggaggcgagtctaggagaatatgtaaagtaggtgatatggcacaaggagagtctgagagaggaggccagtgcatatagatgtgatgtggtggtccaggcagggcagcaggcctgggagagcatctgatgggggtgacatggtgcaaggagggtctgagggaggaggctggtgcgtgtagatgtgatgtggtggtccaagcggggaggcgggcctgggagagcgtctgacgccgggtgacacggggcaaggagggtctgagggaagaagccagcatgtgtagatgtgatgtggtggtctgaggggggaggcaggcctaggagagcgtctaatgcaagtgatatggtgcaaggagcgtctgagggaggaggccagtgcatgcagggcccagggtggctgctgatgggatgtggaggtcagatggaggaggcaggcctagcagaggtctcaagtgagagatggtacaaggaggtttttttgacagaggaggcaggtgggctgtggcgctccaatggtagaggcaggatctcaccctcacgtctgagggaggaggcaggaaggcccttgaggtctcagggggatgagaatgtcctagatggtcttgggcacaacggacggccttgctgggagcaggggtgaggagaggagagggacaggccatcccagccctccgaggagagccaagagagtcctggcaccgctttctgtgaatgcttgttggttgattgactctcagaccatgccagcagaggcctgatgagcctggccctgccagaggggtgtttgccggtggtcaaatgcctgatgttgagaccagctagctctgtggggttgaggaaatccaaggcggcttcccagaggaggaggtgcagctgagctcagctctgcaggatggccaggccacagtgaacaaggagatgccccaggggtcctggcaggagcgtggagatgagaggcctgatgcctgtgcctctggtcccggtgctaagagcagggttggtcctgcagcttcttggctgcgtggccctcttggacttcagtttctcttgcctgccaaatggtggagatgatcagtctgtagctggatggggctatgggaggttccagaagatcatgcgtgtagccacgtgcgaggtgtcagctgcatcccaagacctgagtgggtgcacagcacacccctgccatgcccatccaggccgtgtctggagcacgcgtgaacccccacacacccaggggctgccagagcatgtgggatgggtgtacgccagacgcagacccacacaggtcaccagcccagccccagcccaggcagcactctatagaaacaggcagttgcacagcctgagagggaggggcatttgcccgaacaggaggaccctggggccagactgcccatgctccagacacagcccttcttttccccagctgtatggacacatcccttttctgtgcctcagtttcctccttggtgcaatgggagtaacagccatgccaccttctagagctggtgcaagggtgagacagggtcacgggctcccaggctctagggtgtgtggaaagacagcagggcagagttacccagtgtttttttttttttttttttcctggagacagggtctcgctctgtcacccacgctggagtgcagtggtgcaatctcggctcactgtagcctcgacctcccaggctcaagcaatcctcctgcctcaccctcccaagtagctgggactataggcgcacaccaccacacccagctaatattttatatatatatatatttttttgtagagacagggtcttgctatgttgcccaggttggcctcaaactcctgggctcaagccatcctcccaccttggcctcccaaagtgttagaagtacagcaggcaagagccactgcaccacaccagttacccagtcttttttttttttctttctttttttggagatggagtttcgccctgttccccgggctggagtccagtgacgcaatctcggctcactgcaatctccacctcccaggttcaagcgattctcctgcctttgcctccccagtagctgggcttacaggtgactgccaccacgcctggctaatttttgtatttttagtagagacggggtttcaccatgttggccaggctggtcttgaactcctgaactcaaacgatccactggcctcagcctccccaagtgcggggattacaggcgtgagccaccgcgcccggcagttacccagtcttgatcttgattctttgaccttgaccttagcatctttctcctcccccacccccactgatgagcaacaaacctgctggggttggctgtgagggggcactggggacggtgggggcagagaggtgggccgggtgactgcctgttgggagcaggggccaccgtggggacggaggttctcatcgtcacacagggccagacctctctgccaccacacatcttcctcgcccggggccccgcccccacctcctccgtgctgagctgatacaattttgaagcgagcttttctgctgcagtcagcacaacctctgggcgcctccccacccccaccctgcccctcccgcctctgctcagcaggcaggcctgtgccccaggtcaggttggcctctctgagtgaaggctgcaccctcccttgcccccagcctgcccccttcatccccaagggaatccctgcttcaattggccccagcaggccacaccctcccccaattggccccagcagggcacacccccccccaaccctcccacctgcccactgcgggtgctccagctcctcatgggggtaagagctgggcctggactccaaccccagctcagctgcccactggctgggtgatgtggggccagtcactcaccctctctgtgcttcatttccttgtctataaactggggggctcaaaactggttgccttgtgggaaatgtcaagtgcccagggtgagagctcagtaaaccacccacaaggcatcgtgaagaccaggcactaggcagggggctagggcccttggtggttatcgttactaacattatcctcttcgggattggtttgtttgtttgttattattggtttgggttttttgggggtttttttggttgttgttgtttttttttttttttttgagacagactcttgctctgtctcccaggctggagtgcaatgacgcaatcttggctcactgcaacctctgcctcccgggttcaagcaattctcctgcctcagtctcccgagtagctgggactacacatgcccaccaccacacccggctaatttttgtatttttaatacggacggggttttgcatgttggccaggctggtctccagctcctaacttcaggtgatccacccgcctcggcctcccaaagtgctgggattacaggcgtgagccactgcaactggccttgttttttgttttttgcagagatggggtatcactatgttgcccaggctactctcgaactcctgggctcaagtgatcctcccgccttggcctcccaaagtgccaggattacaggcgtgaccccctgcgcccggcccatcctcctcattctgattataatctcccactgccagacctttccttatgcattccctggacatagaatgtctttcccatatggaaaaccccaactccggctgggtgtggtggctcatgcctgtaatcccagcactttgggaggccaaggcaggtgactctcctgagctcaggcattcgagaccagcctgggcaaaatggcaaaaccccatctctaccaaatatacaaaaaattagccacctgcctggctgaaaattctttcccattctcacagctgccctgtgaggcaaggatcattgctgtatgccttttttttttttttttttttttttttgagatagggtctcactctgtcacccaggctggagtgcagtggcgcgatcttggcttactgcaacctctacttcctgggttcaagcgattctcatgcctcagcctcccgagtagctgagattacaggcgagcgccaccacacctggccaatttttgtatttttagtagagacgggctttcaccatgttggccagggtggtctggaactcatggcctcaagtgatccgccctcctcggcctcccaaagtgctgggatgacaggcgtgagccaccgcgcccggcctgttgtacgcattttacagaggaggaaacagaggctcagaggagggatttgacctgccgtggtcacacagccgagactgggccaggtgggatttggacccacaagcagcttctgcctctgccctgtccttgacacctgcctcatcctccattattgtcagaaggggatgggcggaagttgtggtgcgtgagggggcagtctgctggcacggtgtggtcaccttctggcagggttgtgtgagggccccacaggctgaggtcttatgtagggtccccaggctgtggctggcctccaggcctcagcgctgatcccagtggttgtcaccctgacagcaggaagactggccaccggcttccttttccgaaccgagagtccccttggctgtggagcgtcctggcccagccagagtgcagtgtctggctttcatcagccctgctgggcagctgaggccctgggatagagggagagggagggacgggcatcaggcatagggccttggctggcctcttggaggggtgcagggtggatggcggtggaggggcacctgccatggggctgaaaggagccaccacttgcaacgtcacaagtgagagaggaggccgggcacagtggctcatacctgcaatcccagcacttcgggaggccgaggcaggcggatcacctgaggtcaggagtttgaggccagcctggccaacatggtgaaaccccatctctactaaaaatacaaaaattagccgggcgtggtggcgggcgtctgtagtaccagctactcgggaggctgaggcaggagaatcgctggaacccgggaggttgcagtgagccaagatcgcgacactgcactccagcctgagcgacagagtgagactctgtctcaaaaaataaaaattaaaattaataagaagagggtgtcagggaactgcaggaaaataaagcagggagggacatggaggggggctgggggccactctggatggggagggcttctctgaggaggcgtctttgaggtgaggcttgaagggggtgagggagtctggagaggctgggtggagggagcagtgagggggttatagccagtgcgaaggcctggagcccaggagcagcacatggagctggctgggatgttcagggggtagtgagtggcgagggccgtcctgtggccttccagtgagggtgaccagccgggggtggggcgggagagggtgacccgggtgctctccgacctgccacgtgctggggaaggagcctgcaggaaccagggcccagagagggaagctgtctgcccgcccagggcctaaacccagccaggcctccccgccccctctggcagcccaagaaatctgaggcgcgggcgggcaccgtgccagggctgggcgggggaggggctgccaggcccgcccgtcccagcagctgccagcccgccccgagccgccagcccagatggtgcccatctgctgacgccgccatgggccagcctcctgttcccgccttgcgtcgtgccaagctcctgcagtccagcgccgggaatggcgcggtgggcagagcccggcccgggaagctcatagcacgccagagaggctgccccgggtgccctggagagggtggcaggagaaacatgggagggggagttccccagcgcttcctggatggaattggggagcaaggaccccaacagcgataatgatggcggcaaacacacatggcgtgccctctgtgtgccaggctccgaggccaccgctcaccctaactggtttaattctctcccccatccaagcaggaagggactttggccttctctcgtgttctagtggaggaagcagagacccagaggtttggacaagagtcacttgtccaaggtcacaaagctcctcaggggcagagccggaatgagaatccagaacccctttgaaaaagggattgaggccaggcgaggtggctcctgcctgtaatcccaacactttgggaggctgaggcaggaggatcacttgaggccaggagttcgagaccagcctgggcaacatagcacgaccatgcccccccccaacaaaatttttaaaaatgagccaggtgtggtggtgtgtacctgtagtcccagctactcgggaggctgaggcaggaggatggcttgagcccaggagttggaggttgcagtgagctgtgatcccaccactgcactccagcctgggtgacaaggcaagaccttatctctaaaaaccgttttttttaaggggtgattgaggccaggtgtggtggctcacacatgtaatcccagctacacaggaggctgaggcaggagagtcgcttgaacctaggaggcggaggttgcagcgagctgagctcatgccactgcactccagcctgggcgacagagtgagaccctgtctccaataaaagggaggtggtattgaaaccccttaaacctcttttcaaaaacaaactaaaagtgccctttgaggttatctagtggaagccacaccctctgagtcatacagatcatacagtgcaggccgtgcacactcagggagtaaatgaatgaatgaatgaatgaatgaggtgaaccctatggaaggggaccaagcctggggccagggtgtccataaagctcaccctgagcttgatggcaggagaaagggtctcaacctgggagtgagggacctgggtcagccacagtgctgccctggcttgctgtgtggctttgagaaaagtcctgccctctctggtctggggttgaggggagtggagggtgggaaggggcggccttgtgggccacagacaggagcaaggcgggtcttcactgaaagcctcccgtcctcttctgcctttattgatcttcatcccggttgtgggtgctgcactggggagacaggccatgagctcgggtgacggtgcctgtttatttgtatggtggacagaatttgtgttcctgtgtgctccaggcagtgtggggcgcattcttctctttgagccttagtttttgcctctgtagaatggggagaatcagagctgtgcccattgcattaaagattggagtcagtggtctctgagaagcatacaggaggcactcaataaatgctcacttccggccgggcgcagtggctcacacctgtaatcccagcactctgggaggcccaggcgggtggatcacctgaggtcgggagttcgagaccagcctgaccaacatggagaaaccccatctctactaaaaataccaaaaattagccaggcgtggtggtgcatgcctgtaatcccagctagtcaggaggctaaggcaggagaattgcttgagcccgggagaaggaggttgcggtgaaccgagattgcgccattgcgctccagcctgggcaacaagagtgaaactctgtcccaaaaacaaaacaaacaaacaaaaagaatgctcatttcctccctggattctctccccaaccccaggagggaaggagggaggtcccagtgccgccgtgaaaccctacacctccttttcccaacccagtgagccagtgggggcaccgtgacccaggagtggctgtcaccagaagctggaccaagtcaccctttccaggtgtctggacagcagaggggtgaggggttcctggcagcagcagcctgttatcccccagggctgggcagccaggtgtgccagccgtctgtctgtgcagagaaggtggctgccgggcgtgagtcgcagacgccagctgatggtgtatttatagcaacggcaggagtccgcggggcatacgtcagtggtaaagagggacgggcaggtgggggtccagctcccacagcagacaagagcccaccaggactggccagggagctgaacagagtgtcagggagaatgaggggcatgttgtgcagccgggaggcccaggatcacacccctctgctctggaactgcgtgatgtttgacaagtgacattgcagctgtgggcctcagtttcctcccccatcaaatggggatgataataatcctgcccacctaatagggctgcataggatccaattagtgcatgaaaagcatgaggacagggcctggtatacagtaagcactcaaaagtgatttgttgcctaaaaaagggagggaatcccaacatgggccacaatgtggatgcatcttgaggatgtcacactcagtaaaataagccagacacagaaggacaaatcctgtgtgattccactcctaggaggtccatagagtcgccagattcacagagacagaaagtaggatggggggtgccaggggctggggagggggctggggagagaatgtttcatggggacggggtttcagtttgggaagatgagaaggttctggagaggatggtggtaatggttgtacaaccctatgaatacgcttaatgctgggttaatgccactgaacttagaaatggttaaaagagaggcaggaggattgcttaaggccaggagttcgagaccagcctgggcaacacagcgagacctcatctgtacaaaaaatttaaaaattatctgggtgtggttgcacgcacttgtgttcccatctactcaggaggctgaggcaggaggatcgcttgagcccaggagtttgaggctgcaatgagctatgatcacaccactgcactccagcctgggcgacagagcaagacttgtctcaaaaccagaaccacccccaccaaaaaatggtaaatttatgttatctagattttaccacaatctaaaaatgtagttctggttgtgaataatgataataacaagtaataatattatatctatggccggctgtggtggcttacgcctgtaatctcagcactttgggaggctgaggcgggaagatgacttgaggtcaagaattcgagaccagcccagccaacatggtaaaaccctgtctctaataaaaatacaaaaattagccagtcgtaggccaggcgcggtggctcacacctgtaatcccagcactttgggaggccgaggcaggcagaccacttgaggtcaagagtttgagaccagcctggccaatatggcaaaaccccgtctctactaaaaatacaaaaattagccaggcatggtggcgcgtgcctgtaatcccagctacttgggaggctgaggcaggagaatcacttgaacccgggaggcggaggttgcggtgagctgagattgcaccactgccctccagcctgggcaacagagtgagactccgtttcaaaaaaaaatgttatatatgtaacaatgtaataattagtaatatgtcatatataatcatggaacaataaataagaaaaatagtgtctgcggtgacagcacagtagttattattgtcgttatcatgatcgtcatcactgtggttctcgtccagctctgccctgcagacagctgtgtaaccctgggtgagtttcttgccagctctgtgctttactgcctcatctgtgaattgagcatagggggtgcctagcaatttaaatgagataatagctcttttttttttttttttttttttgagatggagtcttgctctgtctcccaggcaggagtgcagtggtgtgatcgtggctcactgcaacctccacctcccgggttcaagtgattctcctgcctcaacctcccgaatagctgggattacaagctcatgtcaccacacccggctaattgtggtatttttagtagagcgggggtttcactatgttggccaggctggtctcgaacttctgacctcaggtgatctacctgccttggcctcccaaagtgctgggactacaggcgtgagccaccgcacccggcctaaatgagataatatctatgaaaaaactaaccctttgcatgtgatgagtgctgggaactggtaggctctttgaggagtaggtcctcccaccaccccgcagacgcccctacccagcagaatgctggtttctgcatgaatgcatttgtgtggggactcccgagacagcccctgagggagccctcattcacccgggtggggcccggccctcccagagccagtgggagggggaggcgccttgttgcacctgtgatgccccccgttatggctgggctgcagttgtcaccctggccctgtgcctgggaagccaaggggaggctgagggcagctagggacagctctgtgcccacggccccctccagccagctgccaggccagccccctccctccagctgggcgagggcaggaagtcacagatggtcagggttggtgaggggtgaagcagagggcatttggggacaccggatgtctcgtccagatggggaaactgaggcccggagaggggcgaggcattgccccgagttgcccaggaagggccttggctcttgtcccttctaagtcccatctttatttttattttttattttttggagacggagttttgccctgtcgcccaggctggagtacagtggcgcgatctcggctcgctgcaacctccgcctcctgagttcaagcaattctcccgcctcagcctcccgagtagctgggattacaggtgcccgccaccacacccagctaatttttgtatttttagtagagatggagttttaccatgttggccaggctgacctcgtgatccacccacctcggcctcccgaattgctgggattacaggtgtgagccaccgcgcccagactaagtcccatctttaggtccgcttggctgttccacggccacctggaggggaggtagggccagcaaggagggaccctagggtctcagggcagaagatctgccggaggagagggagaagggggttctgaggggaggaagacgcgagaatctcaacgctgaagtggtttctagattctccagggcatgagtcctgaaatccccaaggcctgagttctagaatttcttccactggggccctgaccacacaggtgattctagaattctcctaggtgagttccagacccaggggtccaggagaaatagaatgttggctgggcgtggtggctcacacctgtaatcccagcactttgggagaccgaggagggcagatcacttgaggtcaggatttcaagaccagcctgaccaacatgatgaaacccggtctctactaaaaatacaaaaatgagccgggcgtggtggcgcgaacctgtaatcccagctactctcaggaggctgagacaggagaatcgcttaaacccaggaggcagaggctacagtgagctgggatcgtgccactgcactccagcctgggcaacagagtgagactctgtctcaaaaaaaaaaaaaaaaaaaaagagttccaaccacacatataatttaacatttttctggtcctcacacttaagaatgtaaatttaagtatactggggaaattaattttaacattattttaagtaatgttaattttttttttccttgagacagagtctcgctctgtcgcccaggctggagtgcagcggtgcaatctcggctcactgcaacctccacctcctgggttcaagcagttctcctgcctcagcctcccgagtagctgcctcagcttcccgagtagtaacattaaaatgtttaattttaacattactttatttaacccagggcatctggaatgatactattgcaatccataaacaacaggaaaaattattggtctattggtcgggtgcagtggctcacgcctggaatcccagccctttgggaggctgaggtgggaggatcacttgaggtcaggagtttgagaccagcctggccaacatactaagaccttgtctctacaaaaaaattaaaaaattagccaggcgtggtggcgtgaacctgcggtcccagctactcaggaggctgaggtgggaagatcgcttgagcccaggaatgtggggctccagcgagctgtgattgtgtcactgcattccagcctgggtgacagagcaagacttcaactcaaaaaaaaagttatcgaggtattttatgatcttttccccacccaccccccacccgcttacactaagtctgaaatttggacagaccacatttcaagcactggatgtcacacgtggccaggggctgctgtattgggcaggccgtgctaagacatctgagttccagagcaggggttcccgacccccgggccacagacgggttccgtgcctgggaggaacctggccactcagcaggagttgagcttagggcaagtgaccattctcacctgagctccacctcccgtcagatcagcgggcggctctgggtgcccctacgagcatgaaccccatggtgaactgaacataggagggatccaggttgcgtgctccttaggagaatctgactaatgtctaatgtctagtttcatcccagaaccatctccccactcaccccgtccctggaaaaattgtcttccatgaaatcggtccctggggccaagaaggttggaggctgctgttccagagaattcggaagcagatctccagtctcccaagttgggttctcgaaaacgtgagggcaggttctagaccttccaaactggttgcttgaaaatccaaggaggctgggcgcggtggctcacacctgtcatcccagcactttgggaagccgagacgggcggatctcccgaggtcaggagttcgagaccagcctggccaacgtggtgaaaccccatctctactaaaaatacaaaaatcagccaggtgtggtggtgcacacctgtaatcccagctactggggaggctgaggcaggagaatcacttcaatccgggaggcagaggctgcagtcagcagagatcgcaccactgtactccagcctgggcaacagagtgagaatctaactcttttgcccagactggagttcagtggtgcaatcacagctcactgcagccttcaactcccaggttcaagtgatcctcccaccttagcctcctaagtcgctggggctgggattacaggcgcataccaccatggttgattttttttttttttttttagtagagatgaggtctcactatgttgcccaggctggagtgctgtggtggactcatagctcactgcagcctcaatctctcaggctcaagggatcctcctgcttcagcctcccaggtagctggcagtataggcgtgcaccactacgcctggctgattttttatttttatttatttatttatttactttttgagacggagtcttgctttgtcacccaggctggagtgcagtggcgcaatcttggctcactgcaacctccacctcccgggttcaagcgattctcctgcctcagcctcccgagtacctgggattacaggcgcgtgccaccacaccggctaatttttgtatttttagtagagatgggatttctccatgttggccaggctggtcttgaactcctgacctcgggtcccaaagtgctgggatgacaggcatgaactaccatgcccggccttatttttatttttcgtagacaggaggtctcactatgtggcccatgctgggatttcaggctctttgagctttcttccatattggttagggctggagcaggactccactgtggcgggaggtatttgggcgcaaggagagcagttgtgaggactggtggtgacccccagttactgtctgttgtgctttggatgctgggcacgggaagcctggctgtaagtgtgtgtttccgggccgggcgcggcggctcacgcctataatcccagcactttgggaggctgaggtatgcggatcacgaggtgaggagatccagaccatcctggctaacgtggtgaaaccccgtctctactaaaaatatgaaaatattagccaggcgtggtggtgggcgcctgtagtcccagctactcgggaggctgagagaggagaatggtgtggacctgggaggcggagcttgcagtgagctgagatcgtgccactgcactccagccggggcaacagagtgagactccgtctcaaaaaaaaaaaaaaaaaaaagtgtgtgtttccaagaggctgttatggggcctcgggcacaccctcactgggtctggatcccagcctgtctaccaccaggcgtcccttctggtgaacagagctatgtgagaacttccaacagggacaccacggccgctcgtagcccagagcttgcagagctttgttcaaaggcaatggcccagggccgagcacggcggctcacacctgtaatcccagcacttgcagaggccaaggtgggtggatcacctgagatcaggagttcgagaccagtctggccaacatggcaaaaccctatctctactaaacctacaaaaattagctgggtgtggtggcacatgcttgtagtctcagctactcgggaggctgaggcaggagaatcgcttgaacccaggaggcagaggttgcggtgagctgagatcgcgccattgcactccagcctggtgacagagtgagactccatctcaaacaaacaaacaaacaaaaaagcagtggccatcatgatcggttgtgtcatctagtgggaggcaggggtgtgtctgcatgcgtgtctggggtgcattgtggggggattgcaggcgtattgagggcttaccaagtgcctggctcatctgagccctcaggaaaccacattgttggcagctacctcaccgtctcacaaccacccgctgaggttggaatgatcattaacagcatttaacagatggggaaactgaggcctagagaggcaaagtcactggcctaaggtcacatagctaaggagcacagtcaggatttaaatccaagcctgggagatcccaggacccacagtgggcaccacataaaggggctgtttggggtatggcagggactgccctggaacgttccggatcctgcctttgggcctacagggctttggtgccggtgagcaggccgcaggttcagctggctcaaggagcagcttcagggctgcagccaggctgggggctgggcaggtctcaaacccctggacctggggaatcagggaggtgtgagctgcatctgaggtcgggtgtctctgtgactctgtctctgtctctctacctctgattctccccaggctgccttgtctcagtccctgtctattcccaccccacctcgctctctctcccggccttgcgagtctcctcccagccccccatcccacccagtgggctgcccggaggtggcggcaacggggcagctgaatgggcctcttgttcctggccacacccgccccttggggtcaccctgggacatgcccaggcagcgtggctaccttaaagggccagtgctcagaaagaatgtgagcgggggaggctgcgtccactcccaaatcccacaccctccccaaggtggaccactcatgtgtctgacgggggtggggagctgtgtacctacacaccctcgtggcttgggggaggcctgtctggagcaggagatgtgatagggtttgggtttgaccttggataaatcccttcatctctctgtgcctcagtttccccatctagatcagggggctccttggtgccacccctgtgggttgctgggcagatggcatattatccaggattttgcacacagttgacactcttccggcgcccactgtgcattgatagagcacctgctgtttcagcccagcattcatccgccgtgcagacttggcaattccttcttcaccttgctccgtgcctcagtttccccaaatgcagaatgaggcgatggctgtcttagcttcacagagagctacgcaaggattgagtcggttcgtggaattagagggtattagggagaagggcctgaaacactgccaagtgtcacctccactggcgcacttattgagcgccagctgcataccaggccttgctgaggaagcctcactgcagaggttgcagtgagctgagaggcaaaggccacccagcctggatctcactctggtgtcatcgcctcctccctctgctcagggttgtgcagcttcaggctgctcccctgccctctctgggcctcagtttcaccttcagagcaacgggaacagccccatcctttcacacactggaaaccatcaccttcttctgcctgggagggggttgtgctgtctctgggaatcccaggcatcccccaggcaggagtcaacccagaggccctcggacccgggctgtaccctgtgacagctccgggtggctacgacgctcccgtgctccaggccagccccacagacagcccgggacaggttgctgccggatggacaagcctgtgcctcgctgccttatgtaaccagtttatgcaagggcagccggcccgcttacataaggggaggccgggccagcgcccagctggggagggggaggctcttaaagggaccggcgtcccccgcggctccctccacgggcactggtgcgaattcataggcgagctgcggactccgccctcagcaaggccgccattaatgtcgttatgattatttttgtggatgttgtttatcatcactatattctttccccagggcgggggttcagctgagcggaggaccacgcccagtgcttgggcagaggcttgggctgtgacgctggctctgggtgtcacctggttaagtccctgtctctgagcctcagcctccccttctgcacagtggggcaatgcaggaagacgtgaggtcctggagggtcctggccctgctgcctgttcactgtgtggcctcaggcaggtggcatcccctctctgggcctcagtttccccatctataaaatagcgcctgctctgtggggttgctgagggagagtcaataagacatattaagagtttacatgcccgccaggcatggtggctcacacctgtaatcccagcgctttgagaggctgagacgggaggatcacttgaggccaggagttcaagaccagcctgggcaacatagtgagatgcccatctctacaaaaaataaaacttagccaggcatggtgatgtgtgcctgtagccccagccactcgagaggtcgcggcaggaggattgctcaagtctgggaggttgaggctgcagtgagctgtgattgggccactgcactccagcctgggtgacagagcaacaccctgtctcaaaaaataaaaataggccaggcatggtggctcatgcctataatcccagcactttgggaagccgaggaagacagatcacttgagatcaagagttccagaccagcctggccaacaaggggaaaccccgtctctactaaaaatacaaaaattagctgggcgtgtggtgggagcctgtaatcccagctactggggaggctgaggcagaagaatcacttgaacctgggaggcggagattgtagtgagccgagatcgtgccactgcactctagcctgggtgacagagcaagactccatctcaaaaaataaataagtaaataaaaataaaaataggctgggcacagtgactcacacctctaatcccagccctttgggaggctgaggcgggaggatcgcttgagcccaggagtttgagaccagcctgggcaacatagcaaatctctgtctcaaaaatttttgaaaacaaaagagtttaggacagcacggagcacagacactgtcagcactcatccagtggaaccactttgcagccaataaatatttagtaagctcctactgtatgccaggcactgctccaggcgctgggatactgcagtgaacaggacagataaaaattcggccctggccaggcacggtggctcacacctgtaatcccagcactttgggaggctgaggtgggcggatcatgaggtcaggagatcgagaccatcctggctaacatggtgaaaccccgtctctactaaaaatacaaaaaaaattagccaggcgtgatggcaggtgcctgttgtcccagatcctcaggaggctgaggcaggagaatggtgtgaacctgggaggcggagcttgcagtgagccgagatcacgccactgcactccagcctgggtgacagagtgagactctgtctcagaaaaaaaaaaattctgccctcgtggaactcacagtttggttcaggcgatgggcaaagaacaagaaataaatgtcagtttaggcttagtgcggtggctcacgcctgtcatcccagcactgtggggggccgaggcgggcagatcacctgaggtcaggagttcaagaccagcctggccaacatggtgaaaccccgttcctactaaaaatacaaaacattagccaggcatagcggtatgcgcctgtaatccagccactggcaggggctgaggcaggagaatcgcttgaacccggaaggcggaggttgcagtgagccgagattgtaccactacactccagctggggccacagagcgagactccgtctcaaaaaataataataataaaaataaaaagaaataaatgtcagtttagcgataaggactatcaagaaaaataaagaaggccaaaggaaaagaggctgatgggctgtgctggggaggtccctgaaaggctgtctgaggacctgacatttgagctgagacctgagaagtgaggaggaaccagttatatgaagaactgggggaaggcgttccaggcagagggcacagcccgtgcaaaggccctgcggcaggacacacctggcactttggaggaacagtgaggaggcctgtgtggctgcagcagagtgaggagaggaagagaaggaggaggggagggcagtttgtgcaaggcctggtgggcagtaggaaggacttgggctttgaccccaaggcaggtgggagccatagagggctatgggcagaggagggaccagccctgactcaggtgctcacaggcaccctctgcctgctgcagggaggacagactgtggggggtgagggcaggagctggggaccagggcagagtggaccgccctggtgcaagcaggcggtagcagggacagaggcagaggagggggcagaatccaggtcaactccgacggtgtgaggattcagttgctcacctgggtcgtttataccttatctgaggctggcccttgctctccttgccccgtctcctgcctgcaagccgcacctgcctgggcacatgcagggaagggagcggcgcagcactgggcacgcctgggagctctcctgcaatcaggactttgttagcgggcaagctgggatatgggtcctggtgcccgggaggcccgtggggctctgggctcctgccagggtcccagccctaacccaggtacgccacccacatggcagggttattctctttttttttctctttttttagacagagtctcgctctgtcacccaggctggagtgcagtggtgcgatctcagctcactacaacctctgcctcacaggtttaagagattctcctgcctcagcctcctgagtagctgggactacaagtgtgcaccacctcacccagctaatttttgtgtttttagtagagacggagttgcaccatgttggccaggctggtctcaaactcctgaactcaattgatccaaccgcctcgacctcccaaagttctaggattacaggtgtgaaccaccgtacccagcctattctcatttattttctttcttatttttttttcttttttttgagacgaagtctcactctgtcacccaggctgaagtgcagtggcacgatctcagctgactgcaacctccgcctccagggttcaagcaattctcctgcctcagcctcccaagtagctgggactacaggcatgtgccactatagccagctaatttttgtatttttagtagagatggggctttgtcatgttgacgaccaggcaagtctcgaatgcctgacctcaggtgatccacccagcctcagcctcccacagtgctgggattacaggctggagccactgcgcccagacggtccttccttttcatgcctcctccttccactcccccatgtaccatgtctccttgtctctctttttctctctgctcatccctccctctcaactttctttctacaaatatttattgagcacctagtctgtatcaggccttattctagccactgagggcacaacagagatctagacagacaaagcctctgccctcaaggaggtgacattccactggggagatgagcaaacacccgtgcagtcactaagcaactaagcaaatccataggcaatcactaacttcctctgaaggaaagaaaacagaaggctgagattgagggtagccagaggctgcttgaggtgaaggggctcagcgtagacctctctgagaagggagcatttgagctgagaccaggagagatctcaagagagagcaagcagttagctgtttagacagagggaacagaatgtgcaaaggccctgaggcaggactgggccaggtgcattggaggaacagcgaggaggcccctgtggctggagcagagtgagtgagggggagagagggaagaggggagggcagaaagcggacaggacaggttgtgcagggcctgtggtcctagtcctccactttgactactcccccaaatctcttaatgttcctcacattcctttccctgacaagcatttattttgcacctgctgtataccagatcctatcaggagaatcccaaatattcatgcaacaagttcatattgggtgcctactgtgtgccaggctctgctggaataatcacactcatttggctgcaggcatttattgagtgccagctgtgtaaaagcatttatcgagcaccacctgtgtagcaggctctggggagagaggccacatgaaagcttgggaaggagaaagtttccttctaccccctttcaggtttgtgccctctggtttccagccccctcccacattcaaggcaacatttaaacctctgggttcaagttccgttgtccaactgcgtggccgtgagatctgcggcaagccccttcctctctcggatcttccgtttccccctttgtaaagcagaacactccacaatctgatgtgtttacaacttgacatctactttttgcagcaagggaaactgaggcacagagcagggcggagatgtgtctacctctccctccccaagcaagactggcatggagtctattctcctgaccccacgccaaagccagggcgtttggtattttgttttttcttggaggcccagagaggggcagggcttgcctgaagccacacagcaccgggcaggcctcggaattgcggagagccctcccctgggcgcctgcccgggctcccgcgccttcctcctgcctcctttggctgggccgccagccttgcctcccgtcctccggactccccgcgggctgcccagttggagacgcgccccaagaaatatcagaaggaaggggaagccgggaggggcctccgcctcctcccgccaccccccgccgcgcccggctgcccccacccggtgcccgacattggcagagagtgtcctcgggcgcttccgactggccctgcctgcttcgtgtggccactgatcccttccggagcctctccatggggacgcccgtgtgtgcgctcagccagtggcacatgtggctcccggggctcccttctccacccccccagcccctggcctgcccctttccccccatcccttcccgaacctctccatggggacgcgtgcgtgtgcgttcagcccgtgggcacatgtggctcccagggctccccccgaggcctgcccttctcccccccccgtcacagccgccgagtcaggcctgccaggaaggtgttgggggtgggggtgtggggaggcctcagcttggctgctgggaagccaagaatttgctccaaatgtaaacagcgagttattttcagtccactcccccccaccccgggtggcgttgacacatttgacattggcgggaccgggagggggtgggggtgagggtgtgcgtgcgggtatttttaaccttgctcctcacatccctggagtggctggtgccgagtggcagataatggggagggggcgcggaggcgtggggagccctgggtggccgtgcgcgggtgggcgcttggcaaggccgccctgctgttggcaccacgtgtttaacccctcagaggctgcagaggggctgggggaggcggcccagggcccagtggtgccccagaggctcccttgtcaccttctcctggtgtccccccacccccaccccacccaggagggcagggccgggtgcccgaggccggtgccagcctgcgccgcccagacctacaaaatggccgccaaggccggagaaacatctggaacaggggaagggagaggcgagaaaatggccgccagagggatgatgtcatgggcggcgtggcctcccagagcgtccccagcacggggcgagtccctacgcgcaggcctccgagcaggggccctgcggcctccagggacctccagacccgctgcccaggccggacacccacaaagagtgacaccggggtccccaggggtccccagaggcgggcccgagacctgggggagggcgaggccagcactgggcctccagtcccaacagcccgatgctggggacggttccggggcggtggtggccgctgacctgacccgcaggacaccgaggcgtccaccagcgcccgggagggcccggagccaggccatggagccggcgggggccgggtggaaagaaaaaagaaacttttctttgaaagtgattccgaagcaggttggctccggcccaggcggcccggcggcaggggagagggagatggaaagtatgggccagacttaaggaacgcaggaaggacgaggccggggaggcccgggatggaggccagcgtcctggaggtcaccccgtccacgcctctgcctctcgggcccccccaggtcacatccagattttcctccctgtccctggggcgggcggggagtgcggagaacatctatgggcttgtgttttttcctcttttgatttgtccagacaggcgatggacaagggctgggcaggggttttaggtcatctgcactgtcaggatgtggaggctcagagagggagagtgcttttagtgaggtcacacagcactggcaaaactgacagctgcttccctccttagagcatcttggggaggaggaagttctctatggaggatcagggtccgtactggaattcctttctatttttatttaatttaatttatttatttatttatttatttttgagatggagtttcactcttgttgcctaggctggagtgcaatggcacgatctcggctcactgcaacctccacctcctgagttcaagcgattctcctgtctcagcctcttgagtaactgggattacaggtgcctgccactacacccagctaatttttttgtatttttagtagagacaggggtctcaccatgttggccaggctggtctcgaactcctgacctcaggtgatctgcctgccttggcctcccaaagtgctgggattatacgtgtgagccaccgcgcccggcccctttttctttttctttcttcctttctttttttgaaacagagtcctcctgctctgtcacccaggctggagtgcagtgacttgatcatggcttactgtagcctcaaccttctgggctcaagcaatcctctcacttcagcctcctgagtagctgggaccacaggcatgtaccaccatgcccagctaaatttgggttttgtttgtttgtttgagacagagtctcactctgttgcccaggctggagtgcaatggcacgattttggctcactgcaacctccacctcccaggttcaagcgattctcctgcctcagccttccaagtagctgggattacaggcacccgccacgatgccctgctaattttttgtgtttttagtagagatggggttttgccatgttgcccaggctggtctcgaacttctgacctcaagtgatccgcctgccttggcctcccatagtgctgggattacaggcatgagccaccgtgccctgcctatttttttttttttgtagaaatagggtctcactatgttgctcaagctggtctcgaacttctgacctcaagtgatcctcttgccttggcttcccaaagtgttgggattacagcgtgagccactgtgtccagccaatgtctgtgtgtttttcactgctctgtccccagtacctaggacagggcatggtacacagtaggcgctcaagacgtgtgttggataaaagcatcacagttttctcctgaggctggggttggcacagatgctggcacaggaagggggcagaggctcaggaaatgcaaagtaggttgcaacgtaactggacacacacgggaaccctgtggtcacatttttcaggagggatgtgaggaggcgaaaactcaaacttccctcacttcaagtgcagattctgtgccgggagctgtggacgataaaccacatttgaacagaagcctgaataaagcgagagagtgagccaggcaggcatttgcagggacggtgttccaagcagtgtgcacagcccgtgcaaaggccctgaggcaggaccgtgcctggtgcattggtggaacagccaggaggcctgtgtggctggagcagagtgagcgagggggagagagggacgaggggaggaggggagggagggggcagaggcgggctgtgcagggccttgagcgccatggggagatggggagaacttggacttttagatatttggttttctgttttttgttttttgtttttgaggtggagtctcgctctgtcgcccaggctggagtgcagtggtgcgatctcggctcactgcaagctctgcctcccgggttcacgccattctcctgcctcagcctcccgagtagctgggactacaggcgcccgccaccacgcccggctatagttttgtatttttagtagagacggggtttcactgtgttagccaggatggtctcgatctcctgacctcgtgatccacccgcctcggcctcccaaagtgctgggattacaggcgtgagccaccgcgcccggcccaattgtttggttttgtttttgctttgttgttgttgtttttgagatggagtctcgctctgtcacccaggctggagtcactggtgcaatcttggttcaccgtgccctctgcctcccgggttcgagcaattctcctgcctcagcctcctgagcatctgggattacaggcatgcaccaccacgcctggctaatttttgtgtttttagcagagacgaggtttccgccatgttggtcaggctgagctggaactcctgaccttgtgatctgctcgccttggcctcccaaagtgctgggattacagacgtgagccaccgcgcccgggtgaactttcacatatttgtagacccagacacagtccagggtgctggggactagaacaaacgtttgcagaaagggctggggagggtgttccagagaaggagatgtcagagctgggctgcaaagtatggctggaggtttcctaggagggagaggggcagggaagacggcacagcaggagctcagaggactcaggcccaggtcactcgtatattccattgccttccaggacagagaaagttgaaccttcgccgggtaatgtttaaaaatggccggtgacacccagtagctgggaattccagggcctggctttggttctctctttagctggctgaggttgggaggcggacgtggcagccggcagagccagcaacatttggaagccggctaacgttggaaaatcaaccaggcgagctcacggtggcggccgatgctggaaacctgggctccgtgaggtccagcagatgccctgctggggcccaagtggacattctaggccttctgacagcccgccgggtttttaaataagtgtgattatggtttcagcaagtcctgtccttcctacagccaaaagatcaattcaatatggccactccgtgcaatgctgggccacccctgctgggccagggtgttgtgttgaagccaagattcccaacacctgagagtccagaagtttctttaaaaattgctttaactgtggtgagacacacatcacacactttttttttcttgagacagggtttcactctgtcacccaggctggagtgcagtggcactgtcatagctcatcgcagcctcaaactcccaggctcaagcaatcctcgcacctcagcctcctgagcatctgggaccacacatgcagcacgcaccaccacacccagctaatttttattttattttattttatttttgagacggagtctcactctgtcgcgccaactcggctcactacaacctccgcctcctgggttcaagcagttctcctgcctcagcctcccgagtagctgggactataggcgaccgccaccacacctggctaatttttgtatttttagtagagacaaggtttcaccatgttgaccaggttggtctcgaactcctgaccttgtgatcccaaagtgctgggattataggcgtgagccaccgcccctggctgacacccggctaatttttaaaaatattttgtagagatggggtcttgctatgtggtccaggctggtctcgaactccttgcctcaagtgatcctcccacttcagcctcccaaagtgctggaattacaggtgtgagccactgtgcccggcccagagacttttgaaagtctaaaatggattgtatcatagctcacatcactcctcttcccactgcaggataaaacccaggcctctcactgcaacacacaaggccccgaatggtcccgctcccctctccgttcgttcctctttctcttgcccaccacgctgcagcctggggtctgtctctgcctttcacacatccaacttcattcctgccccgtggaccttgcccttgtcaccgaacctttgtggaacgctttcaccccagctctccacatggctgggctccttctcccgctggagagccaccgtcacatcctcagagaggttctgcctgagtcctccctccaacgccgcccccaaagccattctgccttccgccagtttcattgcctccgtagaacctagaaccgtgtgaaatgatctgaggcttcctccatgcactggttctgcccgtctccctccccacttccttctctgccatccccccaaggcctggcgagtagtaggtggtcagtaaacacctgttccgtgagtgccgggtgtgcgttgacctcccagtcaccaacggcggaagcttcagccagcggacgcagggagttgtcccttgcaaagggggtgggtgctcccgggcgggaagggtggggccagagcccacggcgatgcctttgtcatgagctaggatggactgaatttgggctcacagccacggacaggagagaacagtgtgtccgccccgtcagtgccatccagcgtgcgtggctgttgtgcatcatttgtttgcttgagcaaaggctacagggtccagtgacattcttggcagtccatgacacctcacagacctgggaagtcaagagacctggctcccggccagatgagggtatcatttgaaatacaatttgctggccggctgcggtggctcgcacctgtgtttcccctactttgggagacagaggtgggaggattgcttgagcccaggagtttgagtccagcctgggcaacatagcgagactgcgtctctactttttttttttcctgagacggagtctcgctcctttgcacaggctggagtgcagtggttcgatctcggctcactgcaagctccgcctcccgggttcacgccattctcctgcctcagcctcccgagtagctgggactacaggcgcctgccaccacgcccggctttttttttgtatttttaatagagacggggttttaccgtgttagctaggagaacaacaatttgctttccagaaccagagcctctcaacactagcatgtgtgtggtcatccatgctaaatggtgctgaaagaggcatttgtgtctctctgagaaggagctatttgaggaaagtcctgaatgaggggagagaatgagccatgtagatagctgagggaacagtgttccaggcagaggcgcagcccgtgcaaaggccctgaggcaggaccatgcctggtgtgttggaggaacagcgaggaggcccccgtggctagagcagagtgaggaaggggagacaggaaggaggggagggcagggaggggactgatcgggccatgcagggccttgtgggccacgggaagaaggtgggcttttccccgcaaagaaggtgggagctatggagggctgcgggcagaggaggggtaatgttcatttaactcctggagtttgacaaaatgctatcatcaaaacagactttatcacagaacctctagctatccccgtcccctccgtaagctcctctgagcatagcaacagaacgggaaggtaaggcagcgattggaaacgcccgcgttatagatgagcggagagccgctggaggttggaggctccgacagaggaggtgactggtccagagccacatggccaggttgtgctggggctggaactccatcgaacgcaggtttcagggtgcagcccttgtttccataagataccccaaaatcagacaagcctgggacttgccacctcttctttaaaaaccccagtgctgtttttgttgttttttttgagatagggtctccctctgttgcccaggctggagtgcagtggctcaatcatagctcacccactgcagccttgacctcctgggctcaagcagtcctcctgcctcagcctcttgagtagctgatactacaggtgtgcatcaccacagccaggtaacttttttttttaaagtagagatggggtggggtatcctgtattgcccaggcttgtctcaaactcctgagctcaagtaatcctccctccttgaccttccaaagtgcaggaattataggtgtgagccaccatgcccagccctccagtgctttttttttttttttttgagacggagtcttgctctgttgcccaggctagagtgcagtggcacgatctcggttcactgcaacctctgtctcccgggttcaagcaattctccttcctcagcctaccgagtagctgggactacaggcacacaccaccatgcccggctaatttttgtatttttagtagagaccaggtttcaccgtgtcggtcaggctggtctcgaactcctgacctccagtgatctgccctccttggcctctggggattacaggtgtgagccaccactcccggccctccagtgcattttaaaggctctgaaaagtcctacgttgtcctgaaaactcctcagtgatgctgaacctttttgacctgtgaaccccaggtttgggtaaagtctgctcacatccggcggcacacccataggaaacccccagcccggctgtgaggagtgtgaactttgattcaccaggtccttggcccagctttagtttctcccgtgtccgtgtttgcttgtgcaatcatgaatatatattgaccagcaccaggtgccacattgaacagtttgtccgcgccgtcagtgccatccggcatgcacggctgttgtacatcatgtctttgcactggactgagctcagctgcagaaagcagcacatttcagagggtgtctaccgggccaggagaaaacacacaaaccgccaacattttaaagcctgtaatcgacatcgtatacaattggaaaagatgttcatttatatgttttgtttttgttttcttaagacagggtctcagtctgtcacccaggctggaatgcagtggtgcgatcatagctcactgcagcctggagctcctgggctcagacgatccacccacctcagcccccagagtagctgggactgcaggcacaggccaccacgctgggctaatttttagatttttgtagagatggggtcttgctctgttgcccaggctggagtgcagtggtgtgatcttagctcactgcagactcaaactcctggattcaagccatccccacctcagcctcccaagtagctgcgactacaggatgtgccaccatgcccagctaatttatttttatttttatttttgctagagagagtgtctccttatgttgaccaggctggtcttgaactcctgacctcaagcaatcctcctgccaaggcaatcctctcaaaatgcagggattacaggtgtgagccactgtgcccagcctgttcatacgttttaaagagaggtgcagacaaaactgggttggtgcatccacatccctctctgtgtgatgctgggtaatttgcttaccctctctgggtatcctggagattgtcagccccagccaaggatggttaaaaggcattaaacaatacctaggacagagcctgacatctggagctcattaaaccatccgtacatgcagatgtcgttataattattatcaatgctattctgtcactccacaccctgactcccacctcagtggccccaggtgggggtgctctgaaatttctctggcctggctgagcgggaggggccggggttctgctggaataaagaacagaggaggaagccttgaaggatttgttctgtcccagctgtccccagtatcacagttagccacacggatggcagaagggacctttgacagtggacacaggggctggaagggcccagcctggggctcactgcaatctccgccttccagattcaaatgatcctcctacctcagccttccgagtagctgggattacaggtgtgtgccaccacacccggctaatttttgtatttttagtagagatggggtttcaccgtgttagccaggctggtcttgaactcccgacctcaggtgatctactcacctcagcctcctaaagtgctggaattacaggcatgagtcaccgtgcctggccttggggctttatctgactggctagagaatgggattcaaacaccaggaatcatcccaaaccgccaatgagaaggagccctggagtgaggggaaccgagacccctcctaaaaggatttacagggtgtcacagaatcaaaattacagcaaaggctcaactgtgagatgccagggtggctgatcattgattctagacccatcactaccagctggtgttctgtgagtttgaagccattgctgtctagctttgtgcctcagtttccccagctggcgattaccgtcccccatatggggacggtaatcacgtgtctgctgcagaggagttacaaagatttgtgaggcaatggaggcaacatttgcagccgaacctagtcaaaggaattactcactgcgcattaatttgttgttttttgagatggagtctcgctctgtctcccaggctggagtacaatggcgcgatcttggctcactgcagccatcccccgggttcaagcaattctcccgtctcagcctccggagcagctgggattacaggcacgcaccaccacgccaggctagtttttgtatttttagtagagacagggtttcgctatgttggccaggctggtctcaaactccaggcctcaggtgatcctcccacctcagcctcccaacctccctagcatttcaacgacctgaagtgaccctcttgatttattttctgacttgttcatttcctgtcacgttcccattagaacatcagtgcctcgagaggagggattcttgtctgtctctgttgccgctgtgtcccttgggcgtctggcatccgggtggctctctgcaatctgtttgctgagtgatcaaaggaaagaactaatggcaacatagtgcagctccaatgtacagatgaagaaatccaggctcagagatgtggaagtacttgcccagggccacacagccggaagcccgccaactcttttagtaaagggccagtgacactgtaaacattttaggcttttaggcaggtcacatgcagtctctgttgcctattttttcttttgtttacgaccctttaaaaatggaaaagacaggccgggcgcggtggctcacgattgtaatcccagcactttgggagtccgaggcggacggatcacgaggtcaagagttcgagaccagcctgaccaacatggcaaaaccctgtctctactaaaaatacaaaaattagctgggcgtggtggcacgtgcctgtagtcccagctactctggaggctgaggcaggagaatcacttgaacccgggaggtggaggttgcagtgagccgagatcacgtcaccgcactccagtctgggagacggggcgagactgcatctaaaataaaataaaataaaataaaataaaataaaataaaataaaataaaataaaataaggaaaagaccatacttagctgactgtgcaagaataggcaaccccttctagtttgctcatctaatgtcagaacccacgaactgattccaaaaccctccacagagaatctaaaatgctgcaaaccccgactctgtgatgctggggatctaaagtgcttagtttgtttttttgtttttttgttttttgtttttttgtttttgtgttttttgagacagaggctcgctctgtggcccaggctggagtgcaatggcatgatctcggctcactgtaacctctgcctcctgggttcaagcgattctcctgcctcaacctcccaagtagctgggattacaggtgcctgccgccacacccggctaatttttgtatttttggtagagacggggtttctccatgttggccaggctggtctggaaatgctgatctcatgtgatccaaccgcctcaggctcccaaagtgctaggattacaggtgtgagccaccgtgccctgccaagtgcttggttctttagtctggagtgcagtggtacgatctcggctcactgcagcctccacctgccaggttcaaacaattctcctgcctcagcctcctgagtagctaggactatgggtgcatgccagcacacccagctaattttttttttttggtacttttagtagagatggggtttcaccatattgtccaggctggtcccaaacccctgacctcaagtaatcctcctgcctcggcctcccagagtgctaggattacaggtgtgagctctactgcgcccggccaagtgcttggttctttctcgactcaatcctattttgttctacacaggtcaggtctgcctccactcccccaaccccatgccccatttcacccattggcctctgaagcccagagatgggcaggggtttgtctgagaccacacagcaagaggggcagcagaggaggatgggaacccagatctgcttccctcccaggctacacccctgtagccccccaacccctgcaaacttgttatttaagcctcctcattacaggggtttggagccgaggaagccctgctgccttttcgtaaatgctctccctagacagcaatctttgatggaggctctgggagaagttgttcagtgatgtgcatttgtcgagcacctactgtatacctggtgccagtatagggttgggtggaagggtcttgtccactcaacacccctttttctgccctattattgccttccctggccaggcgaggtgactgacacctgtaatcccagcactttggatggctgaggcaggaggagcgcttcagccctggagtttgagttcagcctggccaacatagtgagacctcatctctacaaaaaaatgtttgttaaaaattagccagatgtagggccacaagcctgtagccccggctacttgggaaaagaaggcaagagaatcacttgagcccaggaggtcgagcctgcagtgagctatgatgacaccactgtcctccatcccgggccacagagtgaggccctgtctcaaaaaaaaaaaaaaaatcaagaccatgattgcccccccataaagagcccttttaaacattttttccctaatcactctcctgtgaaattttaatagcataggtatattttatatacctatatatattaaaaatgtacctgtgccatcaaatatatataatatatattatacataggtatataaagtataactatatgtcatatagataggtatataaaatgtacctatatggcctgtaggtatataaaatatgccatataggtatataaaatatacttacgccattaaatatatatttaatatacaaatatatttgtttttttctatactgtaacaacatatgtctgtacattattattattattattattatttttgagacagagtttcactcttgttgcccaggctagaatgcaatggcgtgatctcggctcactgcaacctccgcctcccgggttcaagaagcaattttcctgcgtcagcctcctgagtagctgggattacaggcatgtgccaccgtgcccggctaattttgtatttttagtagagacggggtttctccatgttggtcaggctgctctcgaactcctgacctcaggtgatccaccgcctcggcctcccaaagcactgggattacaggcgtgagccaccgtgcccatcctacatttttttaaaaacacaaaattctggccagacatggtggctcacgcctgtaatcccagtgctttttttttttttttgagatggagtctcgctccgtcgcccaggctggagtgcagtggcgcgatctcggctcactgcaagctccgcctgccgggttcacgccattctcctgcctcagcctccggagcagctgggactacaggcgcccgccaccaggcccagctaattttttttgtatttttagtagagatggggtttcaccatgttagccaggatggtctcgatctcctgacctcgtgatccgcccgccttggcctcccaaagtgctgggattacaggcgtgtgccaccacgcctggcctaatcccagtgcttttggaggcctaggcaggagggtcacttgagcccaggagttagagaccggcctgggcaatatagtgagacccccatctcaaagcagaacaacagcagaacttctgagctagacagacaactttgctttgaatctgacaccagctttgggaaatacgctgtgcgcactgggccttggttgaccaaccttacaaattgagcagatttaatcagatggggtcaggaagtgctaattcagcacagtaaaaactcagcagatggaagctgcccactggggtctggggaatcttggggctgtggaagttagccagccttcgacattatgcactttgtacacatctgctcagaccgaaagaaggtccattttaaggctgggtgtgtactaagtaggtggaggaggaggaattatctgtgcctctttttcttttctttttttttttttttttttgagatggagtctcgctctgtcgcccaggctggagtgcagtggcgcaatctcggctcactgcaacctctgcctcccgggttcacgccattctcctgcctcagcctcccgagtagctgggactacaggcgcccgtcaccacgcccggctaatttttttttttttttgtatttttttttagtagagatggggtttcaccatgttagccaggatggtctcgatctcctgacctcatgatccgcccgcctcggcctgtcagagtgctgggattacaggcgtgatccaccgtgcccggccacctctggaagcagccagggccacacagtgcactagaatattcctcgctgatggcagaatattctgtgctgtccaacttggtcaccaccagccacgtgtggctctttggtgcttgaaatgtgatttgttcaactgagcaacttaaaatttaattttcttttctttttttttttttttttgagacatagtctcgctctgtcacccaagctggagtgcggtgactccatcataactcactgcaacctccacctcccaggcttaagcagtcctcccacctcagctccccgagtagctggaactacaggcatgccactacacccagctaacttttgtattttttgtagagacggggtctcgccatggtgcccagtctggtctggaactcctgggctcaagtgatcctcctgccttggctttccaaagtaccgagattacaggcatgtgccaccacgccccgcctaattttatttcagcgtagctaacttaaatgtaaaaagtcatatgtggctgtgacccttgtactgatggctgtagaacgtgaggagttttcaggagccaaatgatggaagaatggtcagcaggtggttgagaactattcccaggttttagagatgatttaaaatgagacggctggccgggcgtggtggctcacacctgtaatcccagcactttgggaggccgaggcaggaggatcacttgacgtcaggaattcaagaccggcctggctaacatggcaaaatcctgtctctactaaaaatgcaaaaattagccaggtgtggtggcaggagcctgtagtcccagctactcaggaggctgaggcagaagatttggttgaaaccaagagacggaagttgcagtgagccgagattgtgccactgcactccagcctgggcaacacggcaagattccatctaaataaataaatacataaatacataagatgaggcagccaaataaaaaggaaggagattctgaccaggctactcacatgggtgaaccttaaggacattaagctcaattgagaaaagccggacacagaaggacaaatactgcaagtccactcctaggaggtccctagagtcgtcagattcatagagacagaaagtaggttggcggggtcagggggtgtcggaggctggggaggggacggggagtgagtgtttcatggggacagagtttcagtttgggaagagtagaaagttctggagaggatggtggcgatggctgcatggccattggaatgtatttaatgtccctaaagctgtgcatggaaagttggttcaaatggtaaatattatgcatattttaccacaataagaaattaaattaaaaattaaaatgagatggcatagatttatagcatattatttttaaaactaaactaattttggccaggcatggtggtgctcacccatggttccaattactcgacagtctgaggtggggggattgctggagcccaggaggtccaggctgcagtgagccatgattgtgccactgcactgcagcctgggtgacagagcaagaccctgtctcaaaaacaaaattaggccgagcacagtggctcacacctgtaatcccagcactttgggaggctgaggcacgcggatcacttgaggtcagaagtttgagaccagcctggccaacttggtgaaaccccatctctactaaaaatacaaaaattagctgggctaattaaaattagattagaaaattagattacaggtggcacacacctgtaatctcagctacttaggaggctcaggcaggagaatcacttgaacccgggaggcagaggctgcagtgagctgagatcgcaccattgcactccagcctgggcgacacagcgatactctgttccaaaaaaaaaaaaaaatttaatttaattaaaaaacacataaattcctaggactataggaaaagaagaaaacttccttaacccaagaaagggaactacaaaaccccacagctaaccccgtacttagtggtgagaggctggatgttttctcccgagatcaggaacaagacaaggacaccactttccccatttctattgaacattgtactggaagttctgccagaccaataaggcaagaaaagaggctggacgtggtagctcacacctgtaatcccagcactttgagagaccaaagagagtggatcgcttgagcccaggagttccagaccagctagggcagcatcgcgaaaacccgtatctacaaataatacaaaaattagccagatgtggtggcgtgtacctggggccccagctacttgggaagctcagataggaggatggcttgagctcaggagttcaagactgcagtgagccgtgattgtgccaccttactccagcctaggtgacagagcaagatcctgtctcaaaaacgaagaagagaaagagatcagcctggctatcatggtgaaaccctatctctactaaaaatacaacaaaaattagctgggcgtgtgggcgtggtggcacgtgcctgtaatcccagctacttgggaggctgggaattgcttgagcccgggaggcggagattgcaatgagctggatcgtgccaccgcactccagtcctggcaacaagagaacaagagcgagattccatctcaaaaaaataaataaataaataaataaataaataaaagatacaaaataacaccatcaaagacagtaccaatagcgatattaatcaaatagcaatagtagtgaagctgccctctgcctggtgaagcactcactatggcagccatggttctgggagttttattaataattcattcatcacctttttttttttgagatggagtcactctgtcgcccagactagagtgcaattggcccgatctgggctcactgcaaaatccgcctcccgagttcaagagattctcctgcctcagcctcccaagtagctgggattacaggtgcccaccaccacgcccagctaatttttgtatttttagtggagacggggtttcaccatgtggggcagaatggtcttgaactcctgaccttaggtgatccacccacgttggcctcccatagtgctgggaatacaggcgtgagccaccgcgcccagccaatgtttcattcattaccatcttgtccctcataaacagcttccaagagggggtgctatagttgtgtccatttcacagatgagaagagtgaggcgcggatgcatccgaggccccgctccctggctgcccgattcgcaagctcatgctgggagccaccgtggggcctgacacttagtaggtgcccaagaaacattctcccttcccagggaaacacccggatgccagctgggcactgcggcctgctgagacgccagctgggcactgcagcctgctgagtctgtgtgggctctggttccggaagagggtcctgtgcccacggcctggcgcccggacggccggctgcccaggctgggtccttcccaacgtcatggccaccggtgcccagccttgagacagtccaaagggaactggccagctccgaggggccgctggcagccccagcctgggatcggctgcagggcttggggccgagctgggcacactcccctcggctgctgtccagcccagatggccacggccggggcagcctagctggaggaagggcttctctcgtctgctcctctgtttcctgacgaggaaactgaggcaccgggccctgctcctgtgctgttcatggcatccttggtcttggcaatcagtgggtgctggacacacggtgtgtgcatagccattagcacggcgccaggctaactccagaggctccgtgcgctaggaaatatcattgctttgatcattctcacagcaaccctgagaatggtctccatttatttttttaaaacaaggtcttgctctgtcactcaggctggagtgcagtggcatgatcacagctcactgcacccttgacctcccaggctcaagtgatcctcctgagtagctgggactacaggtgcctgctaccatgcctggctaatttttttttcttttttgttgagatggagttttgctcttgttgcccaggctggagtgcaataatggcgcgatcttggctcaccgcaacctccgcctccggggttcgagcgattctcctgcctcagcctcccgagtagctgggattacaggcatgcaccaccatgcccggctaattttgtatttttggtagagatggggtttcaccatgttgatcaggctggtctcaaactcctgagctcaaagtgatctgcccgcctcggcctcccaaagtgctgggattacaggagtgagccactgcacctggactgtttttttgtattttttgtaaaaacggggtctcactatgttgccctggctggtctcgaactcctggcctcaagcgatcctcccgcttcggcctcccaaagtgctgagattacaggcgtgagccactgtgccactgcccctggcttaatcatcatctcattttgcggatgaagaaactcaggccttgaaaggaaagtgaggccgggcgcggtggctcacgcctgtaatcccagcactttgggaggccgaggcgggcggatcaccaggtcaggagatcgagaccatcctggctaacacggtgaaaccccgtctctattaaaaattcaaaaaattagccgggcgtggtggcgggtgcctgtagtcccagctactcaggagactgaggcaggagaatggcgtgaacccaggagacggagcttgcagtgagccgagatcatgccactgcactccagcctgggcgacagagcgagactctgtctcaaaaaaaaaaggaaagtgaccttctcaggagcacaaagacccggggggtcttggagacagtacttggctcaggtgtctgatcccagcacaaaactgtagataaaataaccctggtgaaaaagcccatcacagggcctgggagggagaacattgctcgtggttctgacccgcagctttccttgtttatgaaatggatacagccaggcatggtggctcacgcttggcatcccagcactttgggaggccgaggcgggcggatcacctgaggtcaggagttcgagaccagcctgaccaacatggtgaaactcccgtctctactaaaaatacaaaaattagccaggcgtgatgacgcgcgcctgtaatctcagctactctggaggctgaagcgggagaatcacttgaacccgagaggtggaggttacagcaagccgcgatcgcaccactgcattccagcctgggagacagagtgagaccctgtctcaaaaaaataaaaataaataaataaaatagaagaaagtaataatggggcggactctcgtgattgaggtctccaaatgccctcaagtgcttcaggagtatcctctcctcactgcctcccagctctgctaaggcctgggcagtgtttgtgcccacgtggaagatgagaaacaggctcaggacagttaggcgacttgcctgaggtcacacagcgatcgcgtcctggccttggggtctggcgggtgggcaggaggggcgtgattctcttcctgcggctttcgacgttggttgctgccaccttcgtctttgacctgggtgatccatgggtggggctggggaggggcgtctgcctggctgggcttgtccacctgccccccaacttcagccctccgtggaggggtcagggctccagagggggcggatgtgactcgtcctgcatccaggctgccagagccgataacgctgagctcagcgtctgtctgcctgcgcgtctgccaaggaacctaattatttttagataagatggaggggcgggcgccggggcagagggagcacccaagctgggcgggcagtggggtcgtcgccatcagagagaccacccctcagcctcctctctctggggtccctgaacggcaacccaggactaacagccgggtccctgggactacaggggcagaggctgaggctaagggacgtgacgtctccaggactcacctctctggtcctcagtttccccatctgtaaaacggacatagtgatagacctcctgcatagggctaaggcggggctgaatgactgaacctcattttattttatttattttgttttatttattttattttatttattttgagacggagccttgctcttgtcgcccagactggagtgcagaggcatgatctccacttgctgcaacctctgcctcccgggttcaagcgattctcctgactcagcctcctgagtagctgggattccaggagcgtgccaccatgcccggctaatttttatatttttagtagagacggggttttgccatgttagccaggctggtcttcaactcctgacctcaagtgattttcctgccttggcctcccaaagtgctgggattacaggtgtgagccaccgtgcctggccgttttgttttatttttttgttgttgcttaatttcattttctgagatggggacttgctatgttgctcaggctggcctccaactccagtcgcccagactggactgcagtggtgcaatcctggctcactgcaacctccgcctccgaggctaaagcgattctcctgtctcagtctcccaagtagctgggattacaggtacgcatcaccacacctggctagtttttgtacttttagtagagatggggtttcaccatgttggccagtctggtctcaaactcctgaccctgacctcaggtgatctgcctcccttggcctcccaaagtgctaggattacaggcgtgagccaccgtgcccggcctgaacttcattttacagatgaggctcagagaaggcaagcgacttgctcagggtcgcacagcaagaaagcggcacagctgggatttgaacatcagtctgttaagattccaggtgtctaagttcttacccacgactgagccgcccctgcagaagcggagggcttacccaacatacgggtacactggcgctcacagggcctagctggtgtctgcagggtgcctggccagatgtctgtgaccctctagggcagcagccaagggaagggcccaaagagagaccccagggcctgggtgtgttttggggccactgtttgtctccatagcactggcccagcccaggactggggccaccagcatcgacacttcatctgctcctggggtggggtctctgtgatgccaccagtgtttcttccctctctttgcagatgcagagcaaagcggcagtccccggacagggatgggctctgaccaggaggacagcaagcccatcacgctgggtgagtctgggggcagcgtggcggtgaagggcggagggcgcagccctgtcctcgtcttttatttgggaatcatttgcttggcaccactcgttttacagatgagcagactgaggctcggagaggttaaggggcctgtccaggggctaccagggagctgggttggaacccacgactctgagctcccagcttctgggctctgaggtgctcaccccatgggagaccccagagggttctacggtcccatgggacgtttgagggtttttgtttgttttgttttgttttcattcatttatttattttgagatggagtctcgctctgtcatccaggctggagtgcagtggcacaatctcagctcactgcaagctccgcttcccgggttcaagtgattctcctgcctcagtctcccaagtagctgggattacaggtacctgccaccacacccggctaatttttgtatttttagtagagacggggtttcaccatgttggccaggtcggtcttgaactcctgacctcaggtgatccgcctacctcggcctcccaaagtgctgggattacaggcatgagccaccgtgcccggcctgtttgtttgtcttagaaacggtctcacgctgctgcccaggctggagtgcagtgacaccatcctagctcactgcagcctggaccagctaggctcaagcgatcctcctgccttagcctctcaagtagctgggactacaggtgtgcaccaccatgcctggcttttttttttttttttttttttttttttttttttgagatggagtatcactctgtcgcccaggctagagtgcagtggcgcgatctcggctcactgcatcctccatctcctgggttcaagcaactctcctgcctcagcctcctgagtagctgggattacaggtgtgtgccaccacggctggctaatttttgtatttttagtagagatggggtttcaccatgttggccaggctggtctcaaactcctgacctcgtgatccacccacctcggcctcccgaagtactgggattacaggcatgagccaccgcgcctggcttttttttttaattttttaaatatttttgtagagacagagtctcactatgttgctcagactggtctcaaactcctgagctcaagtgatcctcctgtcttggcttcccaaagcgctgggatcataggtgtgagccaccacacccagccctcatggggcgtctaatagatgggtaggacagtgtaattctatgttgtagggataggaagtgggaaaattaacctcacttagaccagagcagtcacttccatcctagcccccagctcctgcccttggcccccaccatttgtccttctcactatggccagaggacacctgtgagcccccaagtcagggcccgtccctcctctgcgcacagccatccacggctcccacctctcttggggtaaaagcccaggtcctccctgtggcccacaaggccctgcacaacctgtcccatccctgccctgtcctcccctcctccctctctccccgtcgtccactcccagccacacagacctcctcgccgttcctccagtgcaccagacccagtcctgcctcagggccgctgcacattctgttacctctgtctaaacagccaactaactgctcgcttgttctctccagatctcccctggtctcagctcaaatgcccccttctcagagaggtctaccctaaaccccttcagcataagcagcctctggctaccctcaatctttttttttttttttttttgagacagagtcaggctctgtcgcccaggctagagtgcaatggcgcaatctcggctcactgccatccccgcctcctaggttcacgccattctcctgcctcagcctcccgagtagctgggactacaggcgcccaccaccacacccgggtaattttttgtacttttagtagagatggggtttcaccgtggtagccaggatggtctcgatctcctgaccctgtgatgcacccgcctcggcctcccaaagtgctgggattacaggcatgagccaccgcgcccagcctggctaccctcagtctcagccctctgttttctttccttcagaggaagttagtgattgcctatggatttgcttagttgtttagtgactgcacgggtgtctgctcatctccccagtggaatgtcacctcctccagggcagaggctttgtctgtctacatctctgttgtgccctcagggcttagaatggggcctgatgcagagtgggtgctcaataaatacttgtagaaagaaaagaaggagagagggagggatgaagcagagagaagaagacaagagaggatatatggggagaggaaggaggagagatgaaaaagaaggaaggggccaagtgcggtggctcacgcctgtaatcccagcactttgggaggccaaggcaggtggatcacctgaggtcaggagttcgagaccagcctgaccaacatggtgaaaccgtctctactaaaaatacaaaaattagtcgggcatgttggcacacacctataatcccagctagtcgggaggctgaggcaggagaatcgcttgaacccaggaggcagaggttgtggtgagccgagattgtgcaccctgggcgacacagcgagactctgtcaaaaaaaaaaaaaaaaaagaagaagaagaaagaaggaaagaaagaaagaaaagaaagagagagagaaaaagaagggccgggtgcgggggcttacgcctgtaatcccagcactttgggggactgaggtgggtggatcacctgaggtcaggagtttgagactagcctgatcaacatggagaaaccctgtctctactgaatatacaaaaattagccaggcgtggaggcacatgcctgtaatcccagctacccgagaggctgaggcaggagaattgcttgaacccgggagacagaggttgcagtgagctgagatcgcgccattgcactctagcctgggcaacaagagtaaaaactccgtctcaaaaaaaaaaaaaagaaaagaaaagaaaaagaaggaaggggccagggcgcagtggcttacacctgtaatcccagtactttgggaggccgagtcaggtggatgacctgaggtcaggagttcaagaccagcctggccaacatggcgaaaccccatctgtactaggaggacacgggaggctgacgcaggagaattgcttgaacccaggaggaggcggaggttgcagtgagccgagatcacgccactgcactccagcctgggggatagagtgagactgtctcaaaaaaaaaaaaggaaaggaaaagaaggaaggaagagaaagcgagtgggtgaggcgtccttcttggaaggaccggaacaggcatgcacagggaggctggaaggttctcggaggttcacaggcctgaggccactcctcactggcccccggtgactcctccgtctgtgacccgggtcctccgcggcctcctgtgatccccagacgcctctctccaagccagatgttggagggaggtgggggcagcggcgcttggcctggtcccctggggagcttgggcgtctggtagaggaaatcacgtcctcccagctcgccagggagtcccccagagatggagctgagcaggcgctgcacaaacaggaaaccccggtcgggggaggcggagggggcgtgctgacaccagctggccagctgggtcagcaggaaacggctctggccacttctcctggacactcgggggccaccgctctgtcctcttcagaatgcgtggccctgaacctcccagcgcggggcagggttggttcattgccttcactcagcaaatgactgtaacagggggccgggtgcggtggctcacgcctgcaatcccagcactttgggaggctgaagcgggaggatcgcttgagcccaggagttcaagaccagcctgggtaatatagcaagaccctatctctacccaaaaaaaaaatatacacacacacacacacacacacacacacacacacacactagccccaggagttcaagaccagcctgggtaatatagcaagaccctatctctaccccaaaaaaaaaaaaaaaaatatatacacacacacacacacacacacacacacacacacacacacactagccaaacacggaggtgcatgcctgtaatcccagctacttgggaggctgaggtgggaggatcgcctgagcccaggagtttgagaccagcctgggtaacatagcaagaccctatctctacaaaaagtaataataataatacaaaaattagccaagggtggtgatgcgtgcctgtagtcccagctacttgggaggctgaggcaggagcatcacttcagcccaggagttcgaggctgcagtgagctatgattgcaccgctgcactcgagcctgggcaacagagcaaaattctgtctctaaaaaagaaagattgtaacagggggactggcgggggtttgggtctgcagaactggacacagccctgagctccctgcagtccgtgctgccccctgggggccgggagaggaactgctcccaccgccacccaaaagccaagagcctgtcccacctccaaacctaccaggctccctggctctttccactccaaccctgctggcctgcaacttgccaagtgcatttctacccggaggcctttgcacgggctgttcccagtgccgggaacatcgtggccctcagggaggtgatgaaacatcatccccatcggagaagccaacagtcacggggcggttgccaggcgctgttctcggagctttgcagattttaacaagttccttcctcttatccagtctcatcttgaggtctgtaaaatgccaccatctcggtcaggctttctctgagccctgggtgtaaaatagcctccctccccaccctagctagttccccaccagccgcctgccttaccacaggctgatgcacctcgcatttgacttaatgagcttttaatttgtagtaaaatgtgcatgatgtacaatgcatcattttagccatttttaagtgtccaagtcaaagtgcactaagtacattcacctctatctaattccagaacctttctttttttttttttttacccccaggctggagtgcagtggcgcaatctcggctcactgcaacctccaccttcctggttcaagcaattctcatggctcagcctcccaagtagctgggatcataggcacatgccaccacacccggctaattttttgtattttcagtagagatggagtttcaccatgttggccaggctggtctcgaactcttgaccttaagtgattctcttgcctcagccttccaaagtgctgggattacagatgtgagccgccgagcctggcctaattccagaacatttcatcccccctaaaagaaaccccatccccatcagccaccactccctgtctcctctcccagccctggtgcccacgcatccccttcttgtctctgtggcttggcctgtcctggacatttcagtgaaatggctcatgcctgtaatcccagcactttgggaggccaaggtgggtggatcatgtggtcaggagttcgagaccagccggaccaagatggtgaaaccccgtctctattaaaaatccaaaatttagacaggcactgtggcaggtacttgtaatcccagctacttgggaggctgagacaggagaatcgcttgaacctgggaggcataggttgcagtgagccaagattgcgccactgcactccagcctgggcgacagagtgagactccgtctcaaaaaaaaaaaaaaagaaaagaaaaagaaagaaagaaatggcatcacacactgtgtggccttttgtctctggtgtccctcactgaatgatgtcctcaaggtgcatccatgttgtagcctgtgtcagagcctcgttcttttatttttatttatttactggttttgagatgaagtctcactctgatgcccaggctggagtgcaatgtcgcgatctcggcctgtagctgggactacaggtgcccgccaccatgcccggctaatttttgtatttttagtagagatggggtttcaccatgttggccaggctggtcttgaacccctgagctcaggtgatccacctgcctcagcctcccaaagtgctgggattacaggtgtgagctaccactactgcgcccagcccaaggcctcattctttttcttttccttcttcttttttttttttttttttttttttttgagacagggtcttgctctgtccccgaggctggagtgcagtggtgcaatcatagctcactgcagcctcaacctccagggctcgagctatcctcccgcctcggcctcccaagtagctgggactacaggtgtgcaccaccacgcccagctaatttttgtactttttgtagggatggggtttcgccatgttgcccagtcccgtctcaaactctggggctcaagtgatccacctgcctcagcttcccaaagtgctgggactataggcacaagccaccatacccagctaattttcgtattttttgtagacacagggtttcgccatgttgcccgggctgatctcaaactcctgagctcacgagatccacccacctcagcttcccaaagtgccgggattacaggcatgagccaccacgcccggcatccttttcacggctgagtcctattccagtgtgtggctagaccacgctgtgtttatctcttcatcttttgaagggacatttgggtggctttccagtttgagctgtggtgaacagtgctgctaggaacattcgtggacttttgctgacctattaatcttggctgctgtctgtcgctcacactggactttgagtctcacaggggcaactgcttcagcctgtatcatctcctgctgtgccggggcccagctcagaatcagacactgtggatgcttagtaaacgcctgttgagtccatgaatccctcctacaagggcgtccgagggcaggacagggctgtccccaagctgtctgaggttggccaaggctcccgacctctcggggacaacttcgatttccaaatctgtgaaatgggtccaaaccactccagtcgagaggacagtctcccttcctttaatattaggtaggagcaatgctggggacactgagggttttaactgcggcttgtgggcctcccattcaaccccccattttaactgacccattgctgggtgccaagctctggtctaggcacgaaggacactgcagggtcggggcagacagacatccctgcccacacggacctcccagtctgaaggggagaagaacaagaagccagagtatctcgaagggtgacagtgtgtaaagcaagccagctgcccctcccaggcagttggatacagatctcacgacaaccccgatgatgggattgatggtttcacttttgcaattagggaaacttggaggctgagagagggaaagtgacctgccccagatcacacaccgaggcaggtgatggagccgatgtgagcccaggcctccgctttccgctcttttttttttttttttttgagatggagtcttgctctgttgcccaggctggatggagtgcagtggcgcaatctcggctcactgcaagctccacctctcgggttcacaccattctcctgcctcagcctcccaggtagctgggactacaggcgcctgccaccacgcccggctaatttttgtatttttaggagacagggtttcactgtgttagccaggatggtctccatctcctgacctgtgatcctcccgcctcggcctcccaaagtgctgggattacagacgtgagccaccgcacccggctccactcgttttttaagagagggtgtcgccctgtttcccaggctggagtgcagtggcacaacaatggttcattgcggcctccacctcccaggctcaagtgatcctccagcctcagcctcctgagtagctgggactacaggcacggaccacaacacctggctaattttaacactttttgtagagatggggtctcgctgtgttccccaggctggtcttgaagtcctgagctcaagcgttcctcctgcctcggcctcccacagtgctgggattacaggcatgagccactgcgcccggcctgctgttcacttgaatgcagcattccacagcatgggggaacccggatgaaggctgtgtgaaggcccacactggacaaggaccccccacggggccttccccatcagactggagctgtcattcccccacagcacaggatggacagggggaacgtccaggctcgggccagcccccaggagtccaggcagccctggagtgtggggaagggaaacaggcccagctcagcctactgaccccgctgtcttcctgttccagacacgaccgacttccaggagagctttgtcacctccggcgtgttcagcgtcactgagctcatccaagtgtcccggagtgagtgttcccgtcagccctgagctgggtcttggagaggggagggggccgcagggaggaaggagcccacccccctcaccctactccttgtcctttccagacaaccccctgtgtcactaagccaaggttcctagaaagggaggtggccaggcccttcccagagcccaaggtcagggctccctcccacctctccaggaaacagaatctaaatgctggatggcaactaaggaaacttctgccccagcatccctcctcctccctggggcctccactgtcctgtcccaggagaccccaaaggaccccgcccctcctgtccccttgctttctctgctgacctgctggggacccagcacattccgtcacacactgtctgaatcccaccccagcgagtcctgggcgctgtccttctttagccctgactgacaccttccctgtccagatcagcagagcctggcctccagctttggctacacctctgcctcacagtgtgctcttggcctctccccatggccttggtcctctgatccatagaataaaactggtttcagccaccctaggaaccgggccaatatgggaagggggtccccctttggactgcacccagtggctttccctacctctctaaagcaaaccgcagcactgggcactgcttcctgcctcactctcctctgtcaccctctgcagcacccgtggtgactggaacaggacccaacttctccctgggggagctgcaggggcacctggcatacgacctgaacccagccagcactggcctcagaagaacgctgcccagcacctcctccagtgggtaagtacccaggtccccacctctgggcatttcatgaccccattcatcaacccatcccctctggcccgagctgactcattcctctccctggaatacctcttttcacgattcacctggcctgagaaactcctactcatctcatccttcaaaacccagccagccccacgtgcctcttcccctagccctgacagcccaccgtgggctcccccagcctcaagtcctgccggctcagccagcccttaggaccctccccacccagaagaatgcagacacaggttgttgctgagatatgctttgtgacctcgagcaggtcacactgtgtgtgccccagtttccccatccataaaatgggatcatacccctaacaggcagttctgaggactacaggtggccaggagattagccaggctgcctgggttttggtctccaccatgctagcttggtgtccgacctgtgttgagaccctccctgcctctggcccgggtgtcccatccaagcaatggacaggttggaacaggcgttcgtagggaacgggctgaacgcccgcggctcccgcgatgtctcgcgatactacctccctcgcccccgctcacttaaggaccggaagtagcaaagcccgccgtcgcgccccccgccccgcgtctccctggtaaccagcctctccccttccctcgcccataaggagcaagcggcacaaatcgggctcgatggaggaagacgtggacacgagccctggcggcgattactacacttcgcccagctcgcccacgagtagcagccgcaactggacggaggacatggaaggaggtagggctggtggcgggggcggagccggccttccggtctgagtcaccgtggcgggaactacgtcttccggcagccactgcgcgggcgccgcggggcaggaagccggcctggagccgcggggcctcctgggaattgtagtcgtcccgagctgcgcttggctggaagtacggtccgggttcgcgttctcggatctctttggttccgctgcggcgaaggagggcagagactgtcccctgcctgactctcctgccctccggccgtgaatgccacatctctgtggggtccccgagctgcaggatggactcagtagtgactctgatcaacagggcgcctcttcctgggatctgtcatagaatccctcgtctgtagggaccctgtttgtcctcttcccctctagaaggtcctgagatgccggatcccttctcattggggtccttcttgaggttacttttttttttaaccaggttcccatctccatgggatcttctggttctgcaggagactcgtctcctttctgtagggtctccattcccatggcgtcgttttctaggaagattttatcctcttgcttttctgtcttcagaagggtcctctctggggtgtctttctttctttctttctttctttcttttttttgagatggagtttcgctcttgttgcccaggctggagtgcaatggcgcgatctccgctcactgcagcctccacctccctggttcaagcaattgtcctacctcagcctcccaagtaactgggattacaggcatgcaccaccatgcccggctaattttttctatttttagtacagacggggtttcaccatgttggtcaggctggtctcaaactcccgacctcaggtgattcgcccgcctcggcctcccaaagttctgggattacaggcgtgagccaccacgcccggcctctgtttttgtttgtttgtttgtttgtttgtttttgaaacggagtctcggtctgctgcccaggctggagtgccggggtgcaatcttggctcactgcagcctcgacctcccaggttcaagtgatcctcctgcctcagcctcccaagtatcggactgcaggtgcatactgccatgcgccgttaattttttttttttttttttttttttttttggtagagatggggtctcactatgttgcctaagctggtcttgaactcctgagttcaagtgtgatctttcctcctgcctcgtcctcccaaagtgctgggattccaggtgtgagccaccatgccgggcccctcttatttttttttaatttttgttttttgagatggagtcttgctctgtcacccaggctggagtgcagtggcgagatcttggctcactgcaacccttcctcctgagttcaagcaattctcctgcctcagcctcccaagtagctgggattacaggcacccaccaccacacccggctaatctttatatttttagtagagacagtgtttcaccatgttggccagtctggtctcaaactcctgacctcaggtgatccacccacctcggcctcccaaagtgctgggatgacaggtgtgagccactgctcccggccacctgtaggatttttagaagcagtataacattaggattaagaggtcagattcaggcattggagagacctgggttcagatcccagccctgcccgtgtctagctctgtgtgctgtgtaacctggggcacatcacttaacttctctaagcctcagtttcttcatctccacaatgggggtgatgtgaataatgttctttgggagctacaggaggaggaagggtaggatgtgcgtgaagcaaccgtctggcccatgcgacatacccgggaaacgggaggtcactgtcatccacgtctttataacattcctgtctctgaccaggctcggtggctcacgcctgtaatcccagcactttgggaggccgaggcaggcggatcacgaggtcaggagatcgagaccatcccggctaacacagtgaaaccccgtctctactaaaaatacaaaaaaaatagccgggcgtggcggcgggtgcctgtagtcccagctactcaggaggctgaggcaggagaatggcatgaacccgggaggcggagcttgcagtgagctgagatggcgccactgcactccagcctgggtgacagagcgagactccgtctcaaaaaaaaaaaaaaattcctgtctctttccggcactcggacgcatctagttgtgacatttcaggtgccaaggcccctcccttccacagtgtgggctcccagagcaggaacattcctaaagggtctccatccctcaggggacctgtctcagtatttatgaggttctttttttgtttgtttgttgtttttgttttgagatggagtcttgcttgttttgagagatcacgccagtgcacgccagcctgggcaacagaacgagactatgtctcaaaaaaaaaaaaagaaaaaaaaagtcacttctgtttcgttttttttgttttttgttttttgttttttttttgagacggagtttcgctcttatcacccaggctggagtgcagtggtgcaatctcggctccacctcctgggttcaagtgattctcctgcctcagcctcccgagtagctgggactacaggcgggcaccaccacaaccagctaatttttgtatttttagtagagacggtttttactatgttggccaggctggtcttgaactcctgacctcaagtgatccgccaacctcaagtgatccgcccatctcagcctcccaaagtgctggcattacaggtgtgagccaccgcacccagccgtgacttctcattaactctgtaattgatgaggctgtcagaatgtaaactgcacgctaattaaagtgaaagaccacctttgcgatgagccaaagcaaccctgagaggaaaaattgtagctttaagtctatttattaggagaggagaaaggtggaaaataaagaatctagctttcaacagagaaaactcaaaaagaaaacattttaagctctggagctcagtctgacttttctgcccggctgctcactggcaaccccttccactggggaaggaggtggtagcaatggggggaggacaaagaggaagcccccaccagcttctgctctgtgattgggaatcgcagagctagcagggaatgtcagaggaggtctgtgctcctgcagcttccacttgattacctcaggggatggcaaactcactccctcctgagggtttcttttttttttttttttttttctttttgagacagagtctcgctctgtcgcccaggctggagtgcagtggcgccatctcagctcactgcaagctccgcttcccgggttcacgccattctcctgcctcagcctcccgagtagctgggactacaggcacccactaccacgcccggctaattttttctattttcagtagagacggggtttcaccgtgttagccaggatggtctcgatctcctgacctcgtgatccgcccatctcggcctcccaaagtgctgggattacaggcgtgagccaccgcacccggcctcctcctgagggtttcatcctcagtgtaaagccctcctgtgtgctggccctacctgaggccctggggacacagagatgatccaacccactcttgtccctaccttccaggggctaacagcctagtgagggagatgggtttttatccaggtgactacagcccagaggaggaggcacagaagacagtcagggggaacaagaggaccctgatagaacttggaagaaaagggaggacctccccgaggaggagaatcaggctgacagagcagtgaggagctcgggcaactggcttctctgcttctccagctgtgtgacatttggcaggttccttaacctctctgcccctcaatttcctctgctatacgatcaggttgctggccgggtgcagtggcttacaactgtaatcctagcaatatggcaagaccccatctctacttaaaaaaaaaaaaaaaatagcatcacatagtggtgtacacctgtagtcccagctccttgggaggctgaggtgagaggattgcttaagacgggaggtcaaagctgccctgagctatgatcataccactgcactccatccggggcaacagagaaagaccctgtctcaaaaaaaaaaaaaaaaaaaaaaaaaaaaaaaaaaaaaaaaaaggctcacctgtaatcccagcactttgggaggccgaggcaggcggatcacctgaggtcaggagttcgagaccagcctggccaacagggtgaaaccccatcattactaaaaacacaaaattagccgggtgtggtggtgggcacctgtaatcccagctactcgggaggctgaggcaggagaatcacttgaacctgggaggcggagggtgcagtgagccgagattgtgccattacactccagcctgggcaacaagagcgaaactccatctcaaaaaactctgccttgatatcccagtgaagagaaaacactggaagaatttttttttttttttttttgtcagagtcttgctctgtcgcccaggctggagtgcagtggtgtgatctcggctcactgcaagctccgcctcccgggttcatgccattctcctgcctcagcctcccgaatagctgggactacaggcacccaccaccatgcccggctaattttttgtatttttagtagagacggggtttcaccgtgttagccaggatggtctcgatctcctgacttcgtgatctgcccgcctcggcctcccaaagtgctgggattacaggcgtgagccaccgcgcccggccaaacactggaagaattttaacacccgtggcccagggctggactttacgtaaagcacgcacctggggcgtgagagccgggtttattattaattcgcggctaagctacaaccgggatgatttaagtggatttatccgcagggaagatgatgggagggcattcccagcagggagaatcgtggtttgaggagttgcactgtggatgtttggggccagaccatcctctggggcggggctgtcttgggcactgttgggtgctgtgcagagttcatggcctccacccactccgtgtcaggagcaccccccagtggtgacaaccgtaaatgtccccagacctggccaaatgtctcttgcgggcagaatctcccctataatatagccagaggcatatgcaaagcacctaaacggagtggggagaaggtgcgtgacccctggtctgggccactcttttttttttttttgagacggaatctctctctgtcgctcgcccaggctggggtgcaatgcgcgatcttgactcactgcaagctctgcctcccaggttcaagcgattctcgtgcctcagcctcccgaatagctaggattacaggtgcccgccaccacggctggctaatttttgtatttttagcggaggcgggttttcaccatgttggccagtctggtctggaactcctgacctcaggagttccaccacacccggctaattttgtgtttttagtaatgatggggtttcaccctgttggccaggctgctctcgaactcctgacctcaggtgatccgcccgcctcggcctcccaaagtgctgggattacaggcgtgagccactgcgcctggccttttttgttttgttttgttttgtttttcccaaatagtgacttgctctgtcgcccaggatggagtgcagtggtgcgatcagcgcccactgggctcatgccatcctccttcctcagcctcccaagtagctgggactatgggcacttgccaacacacctggctattttttgtactttttgtagagacagagttccctgtgttgcccaggctggtcttaaactcctgggctcatcctcctgcctctgcttcccacagtgttgggatggcaggtgtgagccaccacacccggctggccgctttttctctatgtcccttcccaacattttagtcccagacagccctgcggaggtgcctggcaggcacctcattttgcagagggaaaccctgaggctcaaagaggtgacatcacctgctccaggtcaccccagcggcaagcgggtgcacagggacacggaaccacgtggccgttcccagcggccccactcagggtacctcgctctctttgttttatggggcatctgtgatgtcctaagccgggttatttcccctcccggcaacactctgtgagatcagggctgcccctggccatcagttgacaagtggggaaactgaggcccaaaggtcccacagcaaagaaggggcagagccccgagcttatgcccagtgcttcctgggcctctccccatcgctgtggcctgcatcggtaaacatttcgcagcctctgaagtcccaagggggacgcctcagaacaggcctggcccctgggctggagcagggttcctgaggttcccagtggggcccagctgtaacctcattggtggaccgaggcaagggccagaggggcccaagggaagggccagaggggccgggggcacaggaagggccggaggggctgggggcacggggagggccaggcttattgttgcagcctgcaaggctgtcccaagccgggtgcctccgcagagggaggacacaaaacaggaacccaggcaggcagggtctctcccgaaggtgcccttggcccctggccaccaccctgggatgctcctcctcctcctcggcatcctccccccacccttccctgccctttccagcttcctgtctagacagcccccaattagccactcattaagggggttaagctgattagagcagctctcccttcctctggcggactcggggccttttctcccgggcagtgctcagccagtccccaaccctgaggctcacagaggcctggggggatcatgccagcccgatgccaggcaagacccccaccccacacctccaggccccacattccagcctctaggctttgcccgcttggggcctgggccaggccctttctcctggccgcctccacccgaggcctccctgcttacgcggctgcgtggggtggagggaaggtgccttggagcagcccccactgtgctttgtttttgctgcttgtgtagctcccccttgaaggcgacaaaggtcccgtccacaggcggttattacacagggcggggcaggcagcccccatccattcctctcctctgtcaccccaggcttcccatcccttttttttttttttttttgagtcagaatctcactctgttgcccaggctggagtgcagtggcatgatctcggctcactgcagcctctgccttccagattcaagcaattcttctgcttcagcctcgcaaatagctgggactgggactacaggcgcctgccaccatgaccagctaatttgtgtatttttagtagagatggagtttcaccatgttggccaggctggtctcaaactcctgacctcaagtgatccgcccgcctcggcctcccacagtgctaggatgacaggtgtgagccaccgagcccagcccgcccatccctttttttaaccccagggtggaggctagtgcaacgtggcctggggagggacagagttgggttccaactccacctccacccccccttggctctatggccttaggcgagtgacgtcccccatcaggcctcagcctccacatctgtgaaatgggcgcagctcctgtaagctctgcacggggcagctgtgaggaccacattaagagaggaggctagtgccttcacagaaggtcctcacccagggcgatgctgccccacccccagggacactggccggtgtctagggacatctgtggttgtcacaactgggagagctcttgacatggagtgggtcgaggccagggatgctgcttagcaccctgcagtgcccaggacagcccctccccagggaacgagccagccccaatgtctacagtgctgaggctgagaaacctgtattaattatgtagaaaaaaattgaggctgagtgtggtggctcacacctgtaatcccagcactttgggaggccaaggctggaggatcgcttgagcctagtagtttgataacatagggaaaccctgtctctacaaaaaaataccaaattagctgcatgtggtggcgtgtgcctgtagtcccagctactcgagaggctgaggttgggaggatcgcttgagcccaggaggtcaaggctgcagtaagctatgattgcaccagtgcactccagtctgggcaacagcgtgagaccctatctcaaaaaaaaaaaaagaaaaagaaaaaagtctgccccctgctcacaacggaataaactcctagtgtggcagacggtgtgtaaaccagggggacccccagctcctgggactcacctcctctctccctccccactcaaggtgtggatttcaatgtgtgcagcctcctgggacctctgcagggcagaggatcatgggacgcagaggatcatgggacgcagagtctcttgggggtccatggaatcctctaagacagaggattttacctatgggtgatcctgaccccagaggacactgggtgacatctggggacctgtgtggttgtcacgactgcagggtggtcctggcatggattgggtccagggacaccgcttagcaccctgcagtgctcaggatggccccaccctagagaatgatccggtcccaaatgtccacagggcccagaggagaccttggtgcactgtcaacgccccgtggtcactgctgtcctcatcagattcatgccctgcatcggggcctctgtccactccacacactctgtgtagggcccctcctgaccccggaccctagagacccagccagagtgggccttggccccctgggggagccggcatttcagtgggagatgggcttgtttgttgagcaaacaaatggctgctccgacggggtgatgagggccttttgtcaaatacaaagaggaggtcagatgggcgtgtgtgacaaatggctgctccgacggggtgatgagggccttttgtcaaatagaggaggtcagatgggcgtgtgtgacaaatggctgctccgtcggggtgatgagggccttttgtcaaatacagagaggaggtcagatgggcgtgtgtgttaaacagacaggaagaagctctgatgggggagccctcgggcctgcgtcctcctcacagtcaatattctcagatggggcattcaggatgccgggaggggcgtatggatgtgttccctgagaggaaagatggccactgagatgggcgggggacgcacatgcccgctggctgaacagggaggtcccacaggggtcccaggcatgcctgctgaacagacagaggatgcttggaggcggggtgcagagtcagtgtccgtagagcctgccgggagcgtgccggcttattctttctcgcggtgcctgagctgcgctcccccctccttcctgccctgccctggctgccgctggccccatctcaggaagctctagcggtgcctgcagggatgtggcggccgggggtggagtctgagccagactatttccatccaggacaagcggttctaggaaatcctcctaaatgagcgtctgacaaccctaacctcgttcccgccgtggccctgcgcttgcagggagctgccagcccctgcacacacacacacacgcttgcacacacgcatgcatgctcatacatatatgcacgcacgtgcacaggcgtgcacacatgtatgcatgcatgcttgcagacctgtacgtgtgcgtgcaagcacacatacatagacatgaacatgcatgtgcaggcatacacatacatgcatatattcacgtgcacacgcatgtgcgcattcacacacatagacacgtgcacaggcatacacatacacagatatgaacgtgcatgtacaggcatacatatgcaggcgtgcacacgtccacatatgctcacatgcgtacacacacatgcacagacatgcacacatgcatgcagctgtgcacatgcgtgcaggcatacacacatacatgcacgcacacacatgcatgtattcacatgcacacacacacgtgcacaggcatacacatgcacacacacgtgccgacaagaccagcctggcctccccggctccaggccaccctcattcctgccacatcctcctgccctggaaaagcccgggcctggctgctggggcccagcttggtcacagacttcatggcatcccactgggcagtggggcctctctgggtggctcagcctcgatgtccgaggcctcaggagtgttcccccttgagtgttcacaggctgggcatgagtggaggtgtcatccttcctgccccccatgtgggtgtcctgggtgcccgcctcctccagagccgggtgttcccgggtccctgggaactgctgacctgcttctggggtgtgtcccagtgacaccttcactcctcacagcatggtgtgtgcagggccatggggacagctggttccataaccacaaaagcagatgaagagctgcatgtccccccacagctgggtcctggatctgggctccccctgggctgcagccatcagagaggacggaagttccctgagtggtaaccccgttcagggaaggatgcagcgatgctgggaggatggaggaggtggggacaggactggggagggcctgtaccacacagatgcctgcaggtgcctatggaaccaccagcaggagacccaagacacggtgacatcctcaccgtttctcatcagggcatcacccggggacagcaggtcacatctggggacatccgtggttgtccccactgaggggcgctcttggcacggagtgggtggaggccaggggtgctgctcagcgccctgcagtgcccaggacagctccctacagagaccgatctggcccccacatcagcagtgctgagactgagaaatcctgcgtgaattatttggaaaatattgagttacgtcactgctcacaccagacaccagaagaagctcctgacagggcagacggtagaaaccagggggaccccagctcctgggattcacctcctctctccctcctcactccgtgtggatttcagtgtgtgcagcctcctgggaccacagcagggcagaggatcatgggacatagtctcgtggagggtccatgggatcccctaacccagagggtctcacccacacgtgattcttgcccagggtacttttggtgatgtctggggacatctgtggttgttacaaccgggggtgctcctggcatgaagtgggtggtggccagggactctgctcagcaccctgcagtgcccaggagggccccaccccagagaatgatccagccccagtgtccacagtgcctgtctgagagaccctggaggtaaggaactccaagggccaggtcgaagggaagctaaactcatcaccctgtttggatggtctcagtagatatgttttaccttaaaagaaatgtaaaaatcctttctaaaaattcggctccccagggcacgcctccctgagattccatttccagggatagggtagggcccaggacactgcatttctcaggcaagatgtgatccttagccctcacttgaaaaagcttctctggggccaggcactgtggctcacgcctgtaatcccagcactttgagagaccaaggcaagaggatcccttgagcccaggagtttgagaccagcctgggcaacatagcaagaccccatctctaaaaaaaaaattgcctggacatgatggtgcatgcctgtggtcccacctacctgggaggctgaggtgggaggatcacttaagcccaggaggttgaggctgcagtgagccatgatcgtgcctctgcactctagcctgggtgacaaataactcggctgggtgcagtggctcacgcctataatcccagcactttgggaggccgaggtgggtggatcacctgaggccaggagtttgagaccagcctggccaacatggtgaaaccccatctctactaaaaatacaaaaatgacccgggcgtggtggtgggcgcctgtaatcccagctactcgggaggctgaggcagtagaatcgcttgaacctgggaggcggaggttgcagcgagccgagatcacgccattgcactccagccagggcgacagagggagactctatctcaaaaaaaaaaaaaaaaaaaagacacagccccagaaggccaggcatttcggctccagagctgggactccaccccagcctcctggaaatacccaaaatggccctctttggggctctgtgttcccacttcattttgaagacagggtgaaagtgtcaaggggcaccgtgtcatctccccactcaccccaaatagcagcagcagcggctcctgcagtagctaacattcttccagctgggtggctgacgttccctcggaaagcagggctgaaggcatcctcagagaatgccccgatgcccagggatctgggacggccatgggcttcacctgcacaggcacccctggcccaatcctcacagctgccactcccacactgctcccgatggaaattccagagctttacagaatcccctgttttatgaaaaggggtagacgtggcagctcaccccaggtcgcacagcctcatggccagccggggtttgaaccctggaccacctgcttcccccacacccaggggctttccagggggtgcctggagggggagggaagccgatgtttggtgggtgagcctccctgagtccatccgttttttgtttgtttgtttacttgcttgtttgtttttgagacagtttcacagtttcattcttgttgcctgggctggagtgcaatggcgtgatctcggcccactgcaacctctgccgcctgggttcaagcgattctcctgcctcagcctcccaagtagctgggattacaggcgtgagcccctgcacccgactatccatctgttttttgtgtttgtgatggagtcttgctctgtagccctggctggagtgtagtggcgtgatctcagctcactgcaacctctgcctcctgggttcaagcgattctcctgcctcagcctcccaagtagctgggattacaggcacccgccaccacacccacctaatttttgtatttttagtggagacagggtttcaccatgttggccaggctggtcttgaactcctggcctcaagtgatctgcccacctcagcctcccaaagcactgggattacaggcatgagccactgtgcctggcctctgtttcttcattcattgattcactgaggaaggtgtgaggggctgagctgctgagttgggggctgtgggggcttttgtcccaggcagcctgggaggtagtgaggcccctgtctgcagagtgatgccagcaagtcactgcagaggggggatgcacctcatttcagccccagggaggctccgttccttcctcccgcgtggacgagggaaggcagagctgagctggggcttgtctgtgcgcccttagccagtcagggtctaactggacttcggatctgactgtctctgccctccctgccaccttctctagggctcgggtgactcccaggtgatggggcagccctgagccttcccatttctctggaaggagagtaggcaagggccaggagcgaggcccaggggcacgtgttgatacccagctctccatcccccggctgtgccgccctggctagccccttctctgctctgagccttcgtttactcctctgtgtaatgggctcacagcctctccccctcaggattctggggtaagaggaggcggggtgatgaggcttcctatcccttcggaggctggctttggggaaggtccagggctcatggggtgtgaccagcctgtgactctctcgtcccatcccctccacaggcatctcgtccccggtgaagaagacagagatggacaagtcaccattcaacagcccgtccccccaggactctccccgcctctccagcttcacccagcaccaccggcccgtcatcgccgtgcacagcggtaagcgccacgggcccctggcggggaggggcggcgggccctcctatcaggcctctcacagccggggaagtcccactggatgtctgaccatgagtcctattgctgtagccttctaggtgggcaaaaaaccatagaggtgccgtagtggagagcgcccagggccttgttccagcccggctgagaggttggactcagtccctttgggcctcagtttcccccctgtataacaaaaggctgcaacctaacttcacctcactcccctcacccccgtctcaatctaatccccccattccaaccccagacactgatggacaggcaggatcagaagctgccaatgaggccaggcacagtggctcacacctgtaatcccggcactttgggaggctgaggcgggtggatcatctgaggtcaggagtttgagaccagcctggccaacatggtgaaaccccatctctactaaaaatacaaaaattagccaggcgtggtggcacgcacctgtagtcccagctactggggaggctgaggcaggagaattgcttgaacccgggaggtagaagttgcagtgagcagagatcacaccactgcactccagcctgggcaacagagtaagattccatctcaaaaaaaaaaaaaaaagctaggcttggtggctcatgcctgtaattctagcactttgagaggccgaggcaggcagatcacaaggtcaggagttcaagaccagcctggccaacatggtgaaaccccttgtctactaaaaatacaaaaattagccgagtgtggtggtatgcgcctgtagtcccagctacttgggaggctgaggcaggagaatcgcttgaacccaggaggcagaggttgcggtgaggcgagttcacgccattgcactccaacctgggcgacagagcaagaccctgtctccaaaaaaaggctaagtgcaagtggctcacgcctgtaatcccagcactttgggatttcaaggcgggcggattacgaggtcaggagattgagaccatcctggctaacatggtgaaaccccgtctctactaaaaatacaaaaaattatccgggcgtggtggcaggcgcctgtagtcccagctacttgggaggctgaggcaggagaatggcgtgaacccgggaggcggagcttgcagtgagccaagatcgtgccagtgcactccagcctgggtgacagagcgagactccatctcaaaaaaaaaaaaagagacatctccatctcggccaggcacagtggttcacacctgtaatcccagcactttgggaggccgaggcaggcggatcacctgaggtcaggagttcaagaccagcctggacaacatggtgaaatctcgtttctactaaaatacaaaaattagctcggtgtggtgatgcatgcctgtgatcccagctactcaggaggctgaggcacaagaatttcttgaacccgggaggcggaggctgcagtgagccaagattgtgccattgcactccagcctgggcaacagagcaagactccatctcaaaaaaaaacaaaacagaacaaacaaaaaatcaccttccatggttgccattgggattaaggggggtgaattgtaggaagcctcaaatattgcttaccaccccatgttctagtgatcaactatttagttctttacacagtcatgcacacagagaggcagtcccaaatcaaagcagccatttgggccaggggtcagcaaacgctggccccctggttgcctgttcttacgaataaagttttattggcaaacagccacgaccacgtctttgtatatgtcctgtggcagctctcaccctgtcttggcagggctgagtaattacagcagagaccacgtggccaaaagccaaaaatatttactatctggccagaggctgtggagatgagggagtgactgctataaatagtgaaaatactaaaaatcactgaactgtttagaaagaggaaaaggcaggcaccacaatagaatatgactcagccatgaaaacgcacgaggctctgacgcaggccaccttgaggacgtcatgctcagtaagagaagccagacaaaaaggccacacagcatgtgatctcatttctatgaaatgtccaggacagggccagccacagaggcaggaaggggatgtatgggtgctggggctgggggaggaggtgaggagtgacggctgatggagacggaatttctttatgtgctggaattaggccgggcacagtggctcatgcctgcaatcccagcactttgggaggctgaggtgggtggattgcttgagtccaggagtttgagaccagcttgggcaacatgatgaaaccccatctctactaaaaatacaaaaaattaaccaggcgtggtggcacacgccggcagtccgtgctactcaggccgaggcaggaggatcacctgaggtcaggaggtcaaggctgtagtgagccatgatcatgcccctgcactccagcctgggtgacaaagcgagattctatctcttaaaaaaaaaaaaaaaagatcactattcagccatttgcagaaagagcttgccaaccctagatttatagtgtagactgtggggccagatgggctgggttcaaattcccggtctgccatctgatgccgtgtggccccaggcaggtgacacatcccctgaaggccaccctgtcatcctctgtttaaaaaaaaaaaaaaaaagacggggccaggtgcagtggctcacgcctgcaatcccagctctttgggaggccaaagtgggcggatcacctgaggtcaggagttcaagaccagcctggccaacatggcgaaaccccatctctactaaaaatacaaaagttagccaggcatggcggcgtgcacttgtaatcccagctactcgggaggctgaggcagaattgcttgaacccaggaggtggaggttgcagtgagctgaggtcataccactgcactccagcctgggtgactgtctcaaaaaaaaaaaaaaaaaaaaaagaccaggctcagtgggttacacctgtaatccccgcactttgggaggcctaggagggaggatcgcttgagcccaggagttcgagacctgcctgggcaacatagcaagacccccacctctacaaaactaaaaaattaaattaaaacacaaggataatatcacagccccagtggggttgccgtgggagtcggggaatttgggtgtcaatgtggtcagtgctgctgggtttttttggtggttattgttactaaacgcactgagatgccggcaggaatgacacccacagacacacagtcacacggtcacagagcagaccggctggagcccccaagtaacccccgcttcccactgtctccgcagggatcgcccggagcccacacccgtcctccgctctgcatttccctacgacgtccatcctaccccagacggcctccacctacttcccccacacggccatccgctacccacctcatctcaacccccaggacccgctcaaagatcttgtctcgctggcctgcgacccagccagccagcaacctggaccggtgagttgggcggggcgcattcgggcctctcctggcggctccaggtgacctcccgggggccacgtgctcacacgaaggcacaacctctgcttaaaagggtcttgaggacttggctctgaagtcccctcctctgtcgtgctgggaggcagctggattgggtcagaattgagatgctttcggatgtcagggtttcgggcgcatcatgtcgcaccctgtggggtctgggtagcacccgtaggtcccagcaactgcgtgagtcgtactcatgttaacacaaggcagggagggactgggcatagcggctcatgcctgtgatcccagcgctttcggaggccaaggcgggaggattgcataagcccagagttcaagaccaacctgggcagcatagcgtgacccagtttctacaaaaaaaatacttaaaaatgagccacgcatggtggcgggcgcctgtagtcccagctactcaggaggctgaggtgggaggatcgcttgaacctgggaggtcgaggctgctgtgagctgtgattgtgccactgcaccccagcctgggtgacagaacgagaccctgtctcaaaaagaaaaaaaaggttggggggcggggggcaggaagacattgattacaaaaaaaccaccaaactcagttcgagcaagacagcgtttgccagactccacaggaagctttggatgttcagagcttttcggactttggaaccacgggccaggccgtggatgatggtggatgatggcgtgctcgcagtgaattaggaaaaacgcggagaacctgctgttaggaggcggtggcactgtttggaaggaaatcagtcgagttggcgtgcagggggtttacagaggagatgcagtgagcgtggccccagtagtgccgggctttgagtgacaccagcaagcgggtgtccccaggcccctccacctccggccgtcctcagacccaccaaacccgccatggtcacacccgcgccctggccccccagcctgccaccccgtccgggccgtgcacagagccgggggcggccggcgccagcagcccgaggtagagggggagcccaccccttaaccacgtgtctctctgttcccccagttaaatggaagtggtcagctcaaaatgcccagccactgcctttctgctcagatgctggcacctccgcccccggggctgccacggctggcgctcccccctgccaccaaacccgccaccacctccgagggaggagccacgtcgccgacctcgccttgtaagcacgcgggaagcggtgccctggtggggcggatgtccgcaggggggcctgtcccctccccagccccactgccaggtcagaggtcaggcccgaccctgcagggcctggcgagtttggtgggtctccggaaaacagcccagtggccacgtggttgggcccatgtagggctgaggcagccttaggggctggccggaccaagcctcgggccagggtgagagtccagggtctgtccccttcgccgagtcacctgggggaccccggtgcccgccgtgggccgtcagaaaccctccctggtatgtcaggcagctgacagtggacacggatctcacagtggcggcccgagggccagactcgacccccagactggtcttttgtttgtggagaaagagaatcggttgttatcattttaaaatcaggacgttttacataaacatttccagagttctggcttcttggggagaaaggagctacaccaggcccagttcctttgggtgacctgggctggaccacacctttagatgggactctcttcgcctgtccacctgacctggaagcccctgggttggcggctgctgcaccttctagatttttctgctctctggatgtggttctgggtggctgctggatggcccctcggtcctggcatccctgtcctgaggtccaccccattcgtccgcagtggctctacccccagactctccccacgacccccatgcaggcttgggtgggtcacccaccctcacagggcgccagacatctctgaacccagagacctctccccatggactccatctgcccctcacccccctttttgagcatctctgtccctcactctccaaatgagaccccccaccccacccaagcagttggtggccacggttccttctaggtgccctcagctcctcttctccctgccccggcgttcctgtccccgtccccactgcgtgccagaacccaggctgcctgcccataaaaaccggcttctgatcactggctggaggagatcagccccaaatccaccctgggctggaatcccacctctgcagctctctcactgtgtgacctcaggcaggtgtcttcccctctctgagcctcagttttctcagctgcaaagtgggtttgccttggtgcccaattcacagggcagtgggggacaagccggtgacatgggtcagggaggcagagaggacattccatgtggcgcctgatgctgcgtggtgtcaggcagctgtggtcattcttgccggctgtccctgcctgctcatctgtgaaatgggagcgttgactgcataggatccagtcagggctcagtgggatcatgcccagagcctggtattcagtagacacttaataaatgcaggatactgcgtgggatccactcagggctcgatgggattatgcccagagcctggcatacagtagacacttaatagatgcaggatactgtgtaggatccactcagggctcggtgggattatgcccagtgcctggcatacagtagacacttaatagatgcaggatactgcgtaggatccactcagggctcggtgggattatgcccagagcctggcatacagtagacacttaataggtgcaggatactgtgtaggatccactcagggctcagtgggattatgcccagagcctggtatacaatagacacttaatagatgcaggatactgcttaggatccactcagggctcgatgagattatgcccagagcctggtttacagtagacacttaatagatgcaggatgctgcttaggatccactcagggctcggtgggattatgcccagagcctggtatacagtagacacttaatagatgcaggatgctgcttagtatccactcagggctcaacgggattatgcccagtgcctggcatacagtacacacttaataaatgcaggataggcatggattccacccccctttccctgcaccggggctcttaactgcaaatctactcctacttctccccataagcctcgctgcctccagctccccccaaccccagccaggacaacttggggaccctgcctgttgcagcttcttctccccctacctgggtcccggcctgtctgaggcccccatccctgctgtagccccaggccgtgagttactcacacgccgacaaaatataatcgctgaggctgaaatataaatacgcacatctgtatgtatgcacacacccagccctccctctgccctctccgggaggaagattaataaataaaacgccctcaataattcatgcaccccgcgcggaggcagccctcagtggcaggaccgggcgggcgctgcccaccctgaataattcacgggcggttttgtgaattacagagccatcctgccttccctctcagcagacaccccgcccacctgggcgatctcagccgtgacccccgggcccctcgagtcaggatccccgcctcccaaggaccttgggcctttcaggggggcccggttcaactgggggtagggcggcaggctcggaggccccaggcactgggtgcagaggcccggctgtgtgacgcctggcggtggccaccctctctggggccagggccgccccggctcccacaacccctcgctaacgggctctcggtctctctcctccctgcagcctactctccgcccgacacgtcccctgcaaaccgttcctttgtgggattaggaccaagggatcctgcgggcatttatcaggcacaggtaggggccgagaggccggctggtggggtgggaggggcagggcagaggggccggcccggggggctcagggcgaagagggcctgctgggtcccacgccacacccctggcacaggggcgccagcctcccacaccccacctgggcctcgagcccccacctggcctctccctgaggccaaatttccctccaccttggtcctggggggatggggtgtggccccagactcagcctgtggggtccccaggagcgtctctggagaccatcgtggtacagctatgggaccagtgtcattaccacctgcttcccatggtatagatgggaaaactgaggcccagagagacaagggggtctgcccagggtcacacagtgcatcaccctccctcctccagcctccatcccccatccacgccgaggcctagagggaccgcggggtggccgggggaaactgaggcagcccatggcggggcgtggggcctcccaggacagcatccaagcccccaccccaggcttcagcccacatctaagccagtgtgaggagtcagggcggagaggcttcgtcagcaggacagacaggatggggcaggggccagcgttcatgttcacgttgatgttcatagtcacgtacatgttcagacggctgcagctgagtgagcatggccggggtcccaccacccctagaaggcaggcaggcaggcaggaggttgacagaggaggctcagagaggggaagtcaattgcctgaggctgcacagtagtctagggagtgggggcgtgggagggcagccttagccccaggcccaggtgtccctcaccccccacccccataaggggctctgtgtaggccaggagtgtgtgagcgcgtcttcgggttatgggtaagcagctggacctttgagcctctgctctctccccggtttgtgttggggagagggttggaggatgtaggagtggctgccacaggcccgggaggtccagactcagagagaaacgagctctgggctacccagcggccacggaactgcagagcgtggagatgtatggggtccccaggggccgtgttcaaatcttccagccactgagggaggtttcctgctgcagagcccacgggcaagggtcacggggcctccccgggaccctgcggggctgtcctggctgagcggatgggggcggggaggggacatggcattccccctccctccctgtgctgggtgcccaggatgcctgtaagcggcccctccctctcttcccaggctccgcaaaaccagccggaggaggaagcagggatggaggctgcttctcctgagttcagaggagatccatgtgctatgggtggagggaatcctgggtcaggggccagggctccagcccagtgctggctcacccactctgaacctctgtctcttcctctggccttgggcacccgcaccaagagcctttgaagggcactgggggacagaaagggcactgaaaggttcaggcttccccacaccccgtaaatattaagtaccctgccttgcacccatagagccccggagagggagtaacttggtcagggtcccccagcgagcagacgtccaggactcctcgctttgggatttgggccccctatggccaacctctcccccgcctggtgctgatggagcccggcattacctctgccacccccaccccacatcgctccctgcccctgcgggaggctgggaacgtcttaagtggttcagaaaccaaagctaataaaagctgcggtgggaggaggcccagcccgcttaacccttccccagcctctgccttggaccaaactctctgaccaggccctcccgccagggcccgggacccttctctcagactgtgctggctccagccccaccccacccaagcctgggagggaagggaaactgaggcaggcaagggtggcacctttctcagcatccctatcttgactggctggactcctctggggacccagaaagggtgggaccagggctggcagaatggggtgtgggggggcactggcaaggggctcagcataggcaatggtgtgggtcgggggagggggagctggctggaatgtgagagatctccggtggcaggggccagacagatgatgcgggctttgctctggggtagtggggagccatagaagggtttagagggagggagtggacacccaccaggcctgggagtcagaactttctggagcacagaaaggaggtgacacattgtcaagaggctctcaggggagcatgggttagggggaaggcgaggtccccaaactgggcatccagggagcacaggtctggggaggaccccattgctgctgccctgactggactaagagcacctgggttgaggccgggcgccgccacctccctgcagaccccggagagagggagggaagaagcagtgagatcccgctctcccctctcccagctcccgctcaaagggccctgagcttggaggcctctcatttccgattctggccagtcagcacttctgcctccgcctcctctattcctggcggattcgcttccctctgccccctcctcccccaaagcctgggtgggcgcgcctttccctctgcctctccggctcccgacaccccccagtccatggactctccccccatcaatatccctccccgtgatctatgctaattgatctcgccctggtcagttacccacccatcgccccatgtccgtccctatcaatccccccactgtgaggctgggtggctctgacgccctggcccctcccctctgtgatgtccttcacgcccctacatttctcctgcacgggaacccacgtaagcagctgggtaaaccgagggtggggggcaaggcgggcattgagccacatgccgggagccacacaggcggctgcagccaggccagcaggataccagagcccaaacctcccccttcacacctactgcctcagtctcccctcagctgagtgggaggatgtggagttgagggtgcccccaccccacccccgccccattgctggggccacagccaggcaggaaggggaggggagggaagggaggagggaggaagggctgaggggaggctggtccaccacggggagggtcacgcccagagtctgtcggttgccaacagaaaccagacatgaggtaatggccaagatgaacttgaacttggctggaggtggggcgctgggaaccactgtggcgccagttccatgggctggcccagtggctgcctggttggaggggctctgttgaatgatttgctgcagcggtggggggcggccccacctctaacctcagttggggagtggaggggtctccccagttccagaggcacagccctcccctcacagtccaccctggatgctccatctggggttggagtttgcgtttccagggcaggggtctggacagcagcttctctgcagagactgaggccggagctgtccccaaatgacgtgaccttgggtacagccccatgcagaactcccctcccttagcctcggtctcccgcctctgggaggttgagagtcatcctcagcccccctgtgcttagtgagcttctgtggagcaagagggggccatccgggggacctgtgacaggatgggccctggacgcccaggacagtgctcagaagatgccaaggggattcctgagaggcaggcgagggggttggccctgggcaggagcagaaatgagagccagagccagacaggcctgagttcaagttccacctctgccgcttccatgctggtgacctcgggcaagttccttgacttctctgggcctcactttcttcacacaaaacagcggtggagggagacctaccccctccttcacggggataccggggacatcattaaagaggagaatttttttttgtttttttttggtttttttggtttttgttttgagacggagtcttatgctgcccaggctggagtgcaatggcacgatcttggctgactacaacctccgccccctggattcagacgattctgctgcctcagcctcccgagtagctgggattacaggcacgtgccaccacgcctggctaatttttgtatttttagtagagacagggtttcaccatgttggccaggctggtctcgaacccctgacctcaggtgatccacccaccttggtctcccaaagtactgggattacaggcatgagccaccgagcccagcctcttgtttactttttaaaaacattctcaaggccatgtgcagtggctcatgcctataatcccagcactttgggaggccaaagcaaacgaataagctgaggtcaggagtttgagaccagcctggccaacatggagaaaccccgtttctaccaaaaatacaaaaattagctgggtgtgatggcgcatgcgtgtaatcctagctactcgggaggctgaggcaagaaaatcacttgaacccgggaggcagaggttgcagtgagccaagatcgtgccactgcactccagcctggtgacaagagcgtgacgctgtctcaaaaaatcaacaaaaaacctctttataaagtgaacaaggcagctgatgtggtggctcatgtctgtaatcctagcactttgggaggaaggagttcaaggccagcctggtctacatggcgaaaccccacctctacaaaaaaaaaaaaaaaactagtcagatgtggtggaacatacctgtggtcccagctactcgggaggctgaggtgggaggatcacttgagcccaggagatggaggctgcagtgagctatgatggcaccactgcactccagcctgggcaacggagcaagaccctgtctcaaaataaaataataaattggctggccacagtggctcacgcctgtaatcccagcactttgggaggccaaggtgggcggatcacttgaggccaggaattcaagaccagcccggccaacatggcgaaacccggtctctactaagaatacaaaaattagctgggtgtggtggggcgggcctgtaatcccagctacttgggaggctaaggcacaaggatcacttgaacccaggaagcggaggttgtagagagccaagatcacaccactgcattccagcctgggcaacagagcaagactctgtctcataaataaataataaatagagaagaaaataatttttaaaatataaaataaaggccaggcagagtggctcacgcctgtaatcccagcactttgggaggccgaggcgggcggatcacgaggtcaagagagtgagaccatcctggccaacatggtgaaaccctgtctctactaaaaatataaaaattagctgagtgtggtggcatgcgcctgtaatcccagctactcgggaggctgaggcaggagaatcacttgaacctgggaggcagaggttgcaatgagccgagatcatgccactgcactccagcctggcaacagagcgagactctgtctcaataaataaataaataatataatataataaagtaagattgagttccagactgggagtgctggctcacacctgtaattccagcactttgggaggccgaggaaggtggatcacttgaggtcaggcgtttgagaccagcctggccaacatggtgaaaccccatctctactaaaaatacaaaaattatccaggtgtggcggtggacgcctgtaatcccagctactcgggaggctgaggtaggagaattgcttgaacccaggaggcagaggttgtagtgagccaatatcacgccattgcactccagcctgggcaacaagagcgaaactccatctcaaaaaataaaataataaataaaatataaaatacagttccagataaatggatcttttgtgtgtggtgtgtaagtatatccccaatgttgcgtgggctagacttatactaaaagaattctgtgttaaccagaactccagtttcactgggcatcctgtactgtgtctggaagcctccctcagagacaaagtcacttgccatgggtcacccagcaggttgttagagcctgggatggggaaactgaggtcacagggttgcaggaggtggggggtgagcgtgggaagaggtaaaccatgtctgcagcagagtctgacccctcgacttctctccctttttctctctccctctttctgtcgccactgggccactcagtcctggtatctgggatagcaaaggtcttcttccctcgccccttctccatcgtcccaggaatcccagggggcagcacagccggcccccggcccacgttttcggtggaaaattagagtgaacaagaacacccctgccgactcccagcccggccaaaaagacaaaacacatagacgcacacactcaggaggaaaagaaaaaacaaaggcagaagaagaagaagaagaaataaaaacccacccaagcaagaagacaaaaggtaaagacgcaacgtttccaactctcgggacgccaaggccgcaggactggagggccaggccccgccacccccacgggagacccgggacagggcgtcttcctaagttattcatctcctctccgcctgctgctcgggaaggacagacgccggccgcccgcccgcgccccggaggccctggctctgtccggagaccaggtgagcacagcctggagcctgtgcccagggccgacaggcgcgacacccagcaaggccacctctccccgggcccccgcgcctctgccggacacggaccggcccctcagcccccaccgaggacgcagccactggggggaaagggagacacagcggaccccggccgggcagcggagaccgcagaggcgggcagggtggggcaggcgagtggtgtcgcgggggtgcgtggcgcttgcgagccctggccaggggaggaagtgaggcccaggcacctgctgcccctcgagggggccctgcctgccgcggggcctccccacaagcccctcccaaagcgccggccgactcgctgtctcgctggggactctttcagccctcgcgcccgcccgtttgggaggagaagtctctatgcaattggccccggcccctccaccccccacccccggcataggaggcccccccacctcgcccggctcacacccccaaagggagggacccacattgcacacactgtaagaaatgcactttccgaggaaggggatgggggagcccggacacccagagctccccgagttgggggtgcccgtctggagcgcccccgtcagcccctggcggtgggaggtgagagcgagtggtttaagtgcctgattaccaccacccgcccccccctttgtccagctgggacacggaatggccgcgggcctcctccccctcccctccagcctctccaccagcccctccagtcaaccctcatcgccgtgcccccccagagctagagagatggggcccctgcgtggcccgaggggcagagctgggcgtcacttcgcaagcgtcctgccctgccggggcgcgggggtgggctctggggaagccggtgcgccccccacgcctccgctgccagtgccttacattctggagcgacccccctccctggtgcctcccagcgaagggggaccgccgtttgcactttcatcgcctaccccgacgcggggcccagctgcgggacgtgcatcacggctgggcccccagaggagagaggaggccgacgccagcggtccccgctcggaacggggagggttttcggggggttcggcgtcgcaccttggggccccccgcagccgtgtagggggcctcccatctgctaagcgtttttccgttgagccgctccaaaaacactaagctggggacgccaggtgcccccccaccccggctccctggccctatccacacctccacccccaccccaggatcgccatctttaggggaggcctgggagggggtgttaggtgttttagggccaccgagctcaaacacaaggacccctccccggcccacccagcccagccccaactgacctccatgcctagggaaaaactccccccaccactgccccctcccccgacccaggccaaagccagggcaggtctccgggtctcacctgctcctagcctcacccccctgcccccgaaaaccagactctcctcccaaactagcctcaggagcttggcgaacccgctcgctcctaaagagaaagacccaggaccctcccccatcacccccaagagaggttcgccatcctctggcctcgagcccttggtccctccgtccgtctgtcctcggggcccgctcccccggtggcccttggggatcaaagcgtgggccgctctccgggagggcgggcgggggagggggtggtcgggttgtgccattggggtgtccggaagcttctcagccagggtgggggtcgtggagtgggggagggaggccagccgggctccagaggggtcagggcgcgacgagaaccaactctttacctaactttgcatggtgcttagtcaaggactcctgcgacctggctcccgaggtcagctggcggcgctgacacacatgcatggcagactatccctggctctatctccctgttcctcgccccctccaccccccacttcctctttaaaaaaaaaaaaaaaaaaaaaaagatacaagaaaaacctttaaaaaaattccatgtttcctaatttgcacgaaattttctaccacaagatgtgccttgccttccgagaataagtattacctttaaacaatatcagcgcacacacatagctgcatgttctgctcgtgtagtttaaaaaaaaaaagacaaaacagtgacatgaaataaaaaataaaaattgaaaagggatgtatttctatttgtaaaaaaaataaaataaaaaataagaaagtgagaatctaaaaaaaaaaaaaaaaaaaaaaaaggaagaaaaaccacgctaaaaatcaagccactgaaaacaattgcccccaggtctacccagcccctggctgtccttggtcctgtctcccctcctgctgtattcaggggtgccccctggtgctcagcctctaccacccccaaccctgctcttgggtacccagaggggtcatttctgaatcccttgcccagaggacagacctccggggcccatcttggccctgggaaagggctctcctctctgattggtccctaggccacgggccggcccccagacaccattcaccgacccactgcaggctgtcctccaaccatggggtggccactccacccgcagccagactccccgctccccacttttcatgcaggctggcatacccctggctcagggtcaaatgctgttccacacccacctcagaggcaccccctctcccctgccccgtgcatccccacccttcttgccaaaggacctcttttcccctatccagagaccaccccaggtggcattctctcccaccttctcctttgtcccccatcccctgtctctgtcttccagctgtgaatatgaagggtatcctgtatgaaacaaaaacaaaacctgatatatgcaatatctgtctgtctgtctgtacccatgggcctggctcagccattggaggcccagccgagggtccggcagggcacagggacagccaggtggcaccgagtcacaggctgtggtccggtggctgagcatgctgttgtcttgtccttgattttattttcttttgttctttttttttttcttttctttttgtttttaactccagcttcctttgctttttacttgaccaaagctaagacaatagccagatggttagtggggcagccaggcagggaggacccagggctgggattctccaaccttaggccattcctgcagccctcaccacctccagcccctccaagcatctcgtgtagggacccacgcagatggtcccattcattcactattgcccccaaccccgggattttgggtggtctccacagccaccatcatacactcatcccgtgttttcttccaaaaagtcacctcagcagcctccccaggcgatacagagggagagcccagaccaccacagctggccacgacattgcccttaagtaatatgcattggccagagagcccgggctggctgtgcacagcattcatgtagctgatttctagctttttttttttttctgccccactcctgagcaaatctgtcttgccaaggaactaggagcaaccggaggcaaagggagtgggtggccccatcactattgggaccatcgcgtccctgcacagcccacacccgggggcccagagtcctgggctggacgccacccttctcaccccgagcttgcctccttggctcacttggcaccttggctgagtacagcaggcaaaagcccataccaggcagcatgttgtggatggtttagttctccccgcctccctgtttcttggaaaagctacagggtccctgtagggcaaaattcccaggcgccttgctgcagacagagtaagacaaaaacaccaggaagcaggattccgtgcccatctctgcagtttgggttcacaaaagggggtgccgtcatccctgggtggaggagggagtgttggttttttgtttttgtttttttaacatgtatgaaactgacatcttctcaaatcttgttccacccccctctggaagcccccatcacccacccctgctatggacaccacacctatgccaggcccccccccccaccccagtctcattctggggtctgcccatgctgtgggaaagaatagggaggcctcccaaatatatgcaaattgtccccattccgtgggggcacctgacaatgacccgggtggagatggggcatggaggagtaggaagacccagccctatttgactggggagaggaggatctggagtccttcatgcccaggtctggaacccaggttctgaccccagggccccaccctgggctggacaatcagatcccaaaggaatgccaaaggggactcggttgggagagccgcttaggggccagacctgggtccccctgcaggtccccaggcagcagacaattccaccttccctgccccaggaccttgagagacagcagcattccaggcacagacagacttggctgcaccccactgtcccttgcaagacaggttctggagccaggagcaactgtccagccctccagaagagacagcaagcagcccccctacccactctggcctccccaatggtactttgacctccagtgtagggctatactatacatatatatatatatatatatatatatatataattttggaatttgtttctcataatacagaatatatagtggctaccttgtatcttggtctggattctctctctgagaccccggattttactttctctttggagggcgctgggacatacatctctcaatccagcttcctccgcatcctcccatcttgccccatttctgccacgtcagacacttcctgagagtctcaccttcaaaatgacaccgctgcccatccattgctcaatggtacagagtgtggggtcagtccaccacccttgacctcccggcagggcaaggtgaggaggcggacccaaagcagtaccagcaggacttgttgccagtgataccaaaacagacttttcccaagcagtgcctcacatgtctgctggtgtggctttgggattctcctgccccacccccccgtccatggcagccccctccccaaggctttgctcacacctgagacaggaaggaggaaggggatccaataggaatatgggccccggaggggaagtcatgcacccccaagccaccaccccccagccttccacgcacatctcctggctggaagagagccctccaaaaaggggacacaggctgccccggcccctcaactgcatccacaccccatcctctcatcttgggtcccagccaggcccccccaaaaccaaagccccctcaagtcctggggtcccagcctgtgcccccagcttcctgcccacccagccctgagcattctcacacagagaaagaacaagcaagggctccagggggacaggatggggcagggcatacagtggggggtgggggggcagctgggaggagggagggacaaaacaaaacattttcctttgggttttttttttctttcttttttctcccctttactctttgggtggtgttgcttttcctttccttttccctttgagatttttttgttgttgtttcctttttgtattttactgatatcaccaggatagtttactctccttctagctttctgcttaccgcacactggataacacacacatacacacccacaaaaatgctcatgaacccaatccggagaaggttccagcaggtcccccaccctcccctcctcctcctacttctcctcttgacagcgaggacaggagggggacaaggggacacctgggcagacccgccggctctccccccaccccaccccgcccctcacatcatactccaatcataaccttgtatattacgcagtcattttggttttcgcggacgcgcctacctaagtaccatttacagaaagtgactctggctgtcattattttgtttatttgttccctatgcaaaaaaaaaatgaaaatgaaaaaagggggattccataaaagattcaataaaagacaaacaaaaaaaaaagaaaaaagaaaaaaatgtataaaaattaaacaagctatgcttcgactctttctggctgtcccgggtcctcttttccatgtcccatgtgggttgctctgtgtcctttggaaaagtgaggggcagaggctgcagggagctggggggaacccccaagccccgtggatgggcaggctgggattctgaaagcttcagatcaagtgtcccctgggggcattagacaatatctggggacatttgtggttgccacgactgggggatgctcctggcgtggagtgggtggaagccagagacactgctcagcattctgcagtgcccagaaccaagattcatccacacaagacatccacagtgcctggcacggagagacctgctttgattgtttggaggggaaaaaaatcagatttgctccctgctcacagtagacaccagggtaagctcccgatggggtggatgacagaaaccagggagacctgcagctcctaggattctcctcctcgccccctccccactcagggtgggattccaatgtgtgcagcctcctaggacctcagcagggtggaggatcatgggacgcagtctactggggggtccatgaaatcccctaacccagggagtctcacccaagggcgatcctgccccccagaggacactgggtgatgtctcagacatccgcggttgtcacgactgggaagtgctcctggcatggagtgggtagaggccagggacgccgctcagcaccctgcagtgcccaggacggccccaccccagagactgatccacagtgcctgggggtgggggagacccactttagatggtggctttgaatgagcttctgaggccagacctgtcccagcaacgctcctggaggctgtaacctcttcccctttgtaggatgggctgtttcacaccccttagcctttgctcattcctgcctccccatctgtgcagacctttcacactggtgtcctcttccaccaggaagtcttcccacctttctccagcctggttccctcccccagcagtctcagagctatcggtgaattccatgaggcatctacggagcacccactctgtgccaggcacaggggattccatcccttcccttgtgccttggaggaatccaagcctggcacacagtcggtgctcaataaatgcacaaaatagcttctcttgctacctggcaaactcccagtcattgagcaaagacttcctgagcatctcctgagtaccaagccccaggacccagcagtgaacaaaacactcaaattcagatcccgtcttggagcctacagcttcctccaggtcaggaagaacagtgaacaacaagtagaagtggccgggtgcagcgactcacacctgtaatcccagcaatttgggaggccaaggcaggaggatcgcttgagtcaaagagttcaggaccagcctgggcaacatagaacccatctctacagatacacttaaaaagttagctgcgcgtggtgacacacctgtagtctcaggaggctgagataggaggattgtttgatccctggaggttgaggctgcagtgagctgtgattgcaccattgctgtccagcctggagtgcaacagagcaagaccctgtctccaatcaatcagtcgataaaatagaagtaaaagatgtcagaggaggtaagtgatgagtagggcaatgaacagaggaagggcggggagtggtcccatctagacagatctggagggagggagggaaggagcgtcctgaaattctggcagaagtcacagctcctgcaaaggcccgagggcgggaccatgcctgcttcattggaggaacagtgaggaggcctgtgtggctggagcagagtgaggagagggatggagggaggactggagggcagggaagggacggggcaggtcattcagggccttgtgggccacagggaaaatgttgacttttcccctgaaggaggtgggagccatggagggctgggggcagaaggatgggccccaacatggtttcaatacaccctcggccaggaagccttcctcacctgccccagcagagcttctgcccccaatcactcctgacccagccctgaccattcaggggcatgaccgtgtccagctctgtcccctccagactgggggcccctcccacactgaggtcagaggggagggaggctggggcccgggagaatcaggagtgtgaaaggggctgggtgcagtggctcatgcctgcagtcccagcactttgagaggtgggaggatcacttgaggtcaggagtttgagaccagcctggacaacatggtgaaaccctgtctctactaaaaatacaaaaattagccgggtgtggtggtgcgcccctgtaatcccagctactcaggaagctgaggtgggagaattgcttgaacccgggaggtaaagaccgcaccactgcactccagcctgggcaatggagcaagaccctatctcaaaaaaaaaaaaaaaaaaatagccaggcatggtagtgcattcctgtagtcctagctacttgggaggcagaggtgggaagatccctcgagcctgataggtagaggctgcagtgagccaagatcacgccactgcactccagcctgggcgacagagcaagaccctgtctcaaaaaaacaaaaacaaaaaaagagtaaggctagttcttgggggggctgagatggggccctccatcctgtccccaactccaaaaccccaaaagaccccaggttgggccagaaaaactctctttgcaccatgggctccttccatcctacccacaagaccacaaggcggggacgatccttttttgcaaatggggaaactgaggcacaaagaagcgaggtaaggtgcattgacagggcagcaggcacagtgcgtcctcgctgacacgaccccacgctgcttcctggtgacaggcaccgaggacaccgaggatgggggggtccgaggccccttcccacgtcccactcccaacttgggtcgcccccactcaccctcagcagcgagattttggcgcccccttgtgggcaggccggggacacccccccaacctcccccatcccagttcctctctgcagcgggaaacgggggctccagtcaggccagaggaggcttcttgtagagcaggggttgagccaaggtcagggggtctcagctggagtcaggggatcagccagggctggggtggaaactcagcggtggaaacttagcctccccttggatcttacggaaagcctcggtcgtgtccagcccttggcccctgggtgatgagattcctggctgggaggggagggctgtcccagtaatgcaggctgttgggttggtcacccctgactccccaccctaaaacgggggaaggcttgtgacaacccaaaatgcccccgcaaaaaaattccaaatgcggccgagtgcagtggctcatgcctgtaatcccagcaatttgggataccagagatgggaggattgcttgaggtcaggagttagagaccagcctgggtaatacagcgagaccctagctctatcaaaaaataaacataaaattagctgggcacggtggctcacaactctaatcccagcacttttggaggccaaggagggtggattgcttgagcctgggagttcgagaccagcctgggcaacacggcgaaaccccgtctctactaagaacgtataaattagccaggtgtggtggcaggcgcctgtaatcccagctactcaggaggctgaggcatgagaattgcttgaacctgggaggtggagattgcagtcaggtgggatcgtgccactgcactccagcctgggcgacagagggagactccacctcaaaaataaaattttaaaaatagctgagtgtggtgatatgtgcctgtggtcccagctgctcaggaggctgaggcagcaggaccgcttgagcccgggaggtcaaggctgcaatgagctatgatggaatcactgcactccagcctgggcaatagagcaagaccctgtctctacaaaatatttaatttttttttagatttccaaacgccccctagtggagaagtcctgccccctgcactccagcctgggaaacagagtgagaccttgtctcaaaaaataataaccatcctggctaatacggtgaaacgccatctctactaaaaaatacccaaaaaattagccggaagtggtggtgggtgcctgtaatcccagctactcgggaggctgaggcaggagaatcgcttgaactggaaggtggaggttgcggtgagccaatatcgggcccttgcactccagcctgggcaacaagagcaaaactccatctcaaaaaaaaaaaaaaagaaaaaagaaaaaaagagaaagaaagaaagaaagaaaagaagaaaagaaaagggccaggagcagggactcacacctgtaatcccagcactttgggaggcctaggcaggcggatcaactgaggtcaggagttcgagaccagcctggccaacatggtgaaaccccgtctctactaaaaatgcaaaaattagccaggcatggtggtgcatgcctgtaatcccagctactcgggaggctgaggcaggagaatcacttgaacccaggaggcagagattgcaccactgcactccagcctgggtgacagagtgattgcaccactgcactccagcctgggcgacagagtgagactttgtctaaagaaaaaaaaagaaaagaaaaaggtcctcattaagaaatggtcattgtggccaggctgaggctggagaactgattgaacctggaaggcagaggctgcagtgaaccaagatcacagcattgcattccagcctgggtgacagagcgagactccatctcaaataaaagagaaatggtcattgttcagggtaaggtccagggcctggagaaggtgaggggaagcaggagaacagaaactgggaaaaggaagtgctagtccctttccaagatattgcagggccctggggcacccccaccctccaagatacagctcccaggaaaaaagtcacgtgccccaaaacaaagtgaggtgggggaaggagcaaagatttgcttggagacggcgctcagggctcaaagtccagggctcaggacagcaaaaaaccagattgccgggggagtgtttaatctgctcagggcgtctgggcacctgtgcaccctgagcctccatatcatccgcccagccatcgcccgcagccccaaaagcagcctccttccccagaggtaaactgagtcccaagagatgacaggagcccttccaaagggctgttacgaatgctttaatgcaggccattgggaagcagctctcagctggcagtgggtgcatgggagaggggaagttctgttcagtagacatcaggcagagagaaaagaaatcaggcagtggggagaagcaggtggagccatgagatcgtggaggattgcgggtgtctcctcaaccagggatgctctccgagtataagaagaatcaccaggcagggaccaagctcaggaagaggggtgcatgaaaaccatgtttgcccagagagcccccaatgagggaggtggggtgggttccaagccttcttcacttgagaacactgtattctgaatcccagatggagtcatttcacgggcttcaagtccagggcactgcttttagggggcagaagaggcatctctgggggactgcctggaagaggcagccaggaatcttcacatgactgtgctctttgctctctcatggtctccgggctctttttcctccagatccagtcccaagttgctctctccttcctttgctgtctttttctccttcttcctcttctcttctttctccttggcctctttcttctctctcttgtcttcactgtagggatacaaaggccccaaaccataataagaaacagagacactcctatttaatggccactcacttgagccagcccatgtgatgagtattttacaagcggtatctcagtgaatcttcaaaataaccctaactacgcggcctcacgatttccatttcacaaagacagcaactaagactcaattgctccatggagggatggatgggtggatggatggatggacataagccaaaggctccctgttgcctcttgggactcagtttactcctggcaaaggaggctgcttttgaggctgggtgcagtggctggacagatgatatggaggttcacactgcatatcatcattgcaactaagactcaactgctccatggatggatggataggtgggtaggtgtgtaaagaagttagggaatagatgggtagatgagtggacaggtgggtggatagtgggtgggtggatggatgatggatgggggtatggatgactggatgaacgggtggatggctaggtgggtgagtggttggaaggatggatggatgggtgggtgggtggatagatggatgatgaatggatgagtagacagatgaatgggtgggtgggtggatgggtgagtggatagttgagtgggtggacggatggtaggtggataggtgatggatggatggtgggtgaattgatgggtgggtgggtggataagtgaatgggtggatgaatggatggatgagtgggtggatgaattaatgaatgggtgggtgaacagatgggtgactgagttggcgaatgaatggatgagtgagtgtgtgggtgggcggatgatggctgggtgattgatggatggtggatggaaggatgatagatggatgggtggatggatgaatgaatgggttggtggatgaatggatggatgggtgggtggatggatgagtagataagtagttacatgaatggactgctgcatggaggttgaataaatgaattggaagataaatgaatacattgcaggaaggagagactgatggatcagtggatgggggtatgcagaatggagaatgggtggatgggagtatagatggatgtatagatcaatgaatgaatgtataggtggatggatggatgagtagataagcagttgggtgaattgatggttgcatggagggagggacagattaataagtagatgaatggatgaattggaggaagaagagaatgacataccaatggataggtagatggaggatgaatgagactgtaggtgggtggatggatcaatgagctaatggatagatagactgatggatggacagttggagagtgaagactgcatagttcgatggacgcataggtgggtgggtgcgtgtatcagtgagtggacagatcaatgggctaatgggtaggtggactgatggatgggtggttggagggtgaggactgcacgggcagactgatagatggatgtacaagtggatggttgggtggatggatggaggattgaacaaggcagaaaggaagctacaggtacaggtgcacaggtgggatccagatcccccagtacatcctgggagtaggaatcatattttactggggctgagccaggtcttagacaaagccaccactcaggtcctctccctcaggcacatcttggactcagctgagactctcccagccaggctggtcacctcccagctcccactctcctactcctgtccccaagcctttgcccaagacagagcccccagccctggatggatggatggatggatggatggaaggatggatggatggataaatgggtaggtggatggatggctgtgtgggtggatgaatgagtgaatagatgggtgatggatggataggtgatggatggatggatggatggatggatgggtggatgggtgggtgggtggatggatgatggattgatgggtggatgaatagatgggtgggtggatggatggtgaatggatggctgatggatagatgggtgggtagatggatgggtgtgtgaacagatgagtgggtgggtggatgggtgagtgggtggatggattggtgaatggataggtcggggggtgggtgagtgaatagatgggtgatggatggatggatggatggatggatggatggatcatggatggtcggtggatggatggtgggtgggtggatgggtaggtgatgaatggatgggggtgggtgatggatggatgagtgatgaatggatgggtgagtgggtggacgggttggtgaatggatgggttgggggatgggtgagtggatggatggatggatggatggatggatggatggatgatagacagatggtgggtggatggatggtgggtgggtggatgggtaggtgatgggtggatgggtgatgaatggatggggggtgatgaatggatgggtgagtgggtggataagtggtaggtgaatagatgggtgggtgggcagctgggtgagtgaacagatgggtgatgaatggatgatggatggatggatgatggatggatggatggtgggtgatggatggatgggtgagtgggtagatgggtgagtgggtggatgggtgagtgggtgaatgggtgatggatgggtgagtgggtggatgggtgagtgggtggataggtgagtgggtgaatgggtgagtgggtggatgggtgagtgggtggatgggtgggtgatggatggatggatggtgggtgatggatggatggtgggtgatggatggatgggtgagtgggtgaatgggtgagtgggtggatgggtgagtgggtgaatgggtgagtgggtggatgagtggatgatggatggatggatggtgggtgagtgggtgaatgggtgagtggatgaatgggtgagtgggtggatgagtgggtgatgggtggatggaagatggaggtctgcatccctgagtcctctgtgggaatcctcaggttgggaggcagtcagagccataggaggcactgagtccaggtgggtcgcccatacctaggccttgtacagacacctacacaatcctacaccacagtcttcttcaacaggtatttattaagcacctcctgtgttccaggcccaatgctgggtatgaggacacagccaggacaaaagctaagttgcctacacaactggaaggcaccacgtaatgtctcaaaattagtgaacaactaagacagctccactggtgataagcatgaatcagacttggggctggggacagtgtcaggaaggctggtggccaggctggaaacccctgactagggactggaggaggagaaggagctgccagaagatacaggaaaggtgaagatcccagggcaggaatgtgtttgaaggattcaggacagcaaggtcatctgcgcacacccattcccccaccccgaggaggggttcacacagacccccagcatccgcacgcatagtacctctggtcctggtataggttggactccattctgaacgtggtctcctcctcgtcctcagccctgcagagataaagggaaaggtggaagggggcgggagaggagaaagggggcggtaaagggaaggaagcggtgtgacagcctcagcctctgtcccaacctcccagccggggctcatgaaccccaggacgcaaggaagggctgggctgcctggctcgttgtcttggggagacgggcgggtgcaagcccgggatctgggctctgagagtagaggttggaggagcagcagggaaatgggagaccttcggactttgaggctggtgatgggggtaccagagagggttgggaagctgggggtgggggcagggctgtgggggcagcggggtgggggcgggcacccacctggccttggaacaccagaggcggttggccagcaagaccaaatagacgatgaacaggaagccgactaccgcagccaggcccaccagccacggcttcaggcgatgctccgtggctgcaggaagttggggaggttcgactcagaggaagaaaaggtcagaagacccccttcccccaccaccctagcaaggagagagagaaggtcactgggggtgctccgacagagggggtattggaaagggacggagcttcagagacctggatggcgtaggggggtcgggagggtttagagagggggagggtaccttaccagagtgggagggagcctgggggcccagagaggggaggggcttataaaagaaggggggcttagaggggacggagtttacaaatcaggagggctcagaaggggcggggcttataatgcaggcagaggctcagggggaggggcttataaaggcggacctcagaagggcggggcttatgacaaaggagtggctcaggggtggggtttataaaggagaacaagctcaggggaggggcttatgaaggaggaggtggctcagatggggagggcttataaagaagagtctggggggttggggcttacaacagaggagctgttggggggagcttataaaaggaggcagaggcttagagggaggggcttataaaggaggagctcagaggggaggtgcttataaggggagagggtctcagagtgggaggggcttataaaggcggcagaggctcaggaggaggggcttataaagaaggaggagctcagaggggaggggcttacaacagacgaggggctcagggaggggtctataaaggatgagtgagaaggaggggcttacagaggaggaagaggctcagatggggaggggcttgtgaactagggggctcagagtgggaggggcttgtagaggaggcagaggctcagggggaggggcttataaagaaggaggagctcagaggggaggggcttacagaggaggagggactcggggaggggtttataaaggagggagagtgagaaggaggtgcttacaaaggaggaaggggctcggatggggagaggcttgtgaactagggggctcagagggagaggggcttatagaggaggcagaggctcagggggaggggcttataaagaaggaggagcccagaggggaggggcttacagaggaggaggggctcggggaggggtttataaaggaggaggagtgagaaggagcggttcacaaaagaggcggggactcagatggggaggggcttgtaaaggaggcccgagctcagagtggggccgagctcaaggcggggggttcagccaggtgtgctcagaagggctggagaggggaaaggctcgggtgggcggtggggggtcccttacagaggagggcagagcccagcgagagggaggccgggcggtactgcgggggttgagaagggcctccaagccactcttccttttcttcctgccccctctcctttttctcgccatggaaaattgggagatggtgatcacctgaccaactcccctatcccgcgacgccccctcccgcccccctgcacctaccctgctgggcctccaccggggagaggagcagaaactccagcaccagaagggcccccagggtctccatgacggtcgagtgagccagcagccagccagcggcggtcccgggtcggcgtccacaggtttggtgtgggcgaggccctgcctccccgtgataaggcacaggcggtccccgggcgggggatgcctgagacctgggagcggggcccgcccctggcaccacctgattgggcatcctgcccctcccctgccagctcctgccccatcgctctccctccgggaggccagactctggacctgtgtaacaattaactgagggagtccctcctccctgcaccctgccctggggaccatcagcctcagggccacccctttgtgatccctgctgcaggggctgagctgagatggctgcgacctcccgtcccggcccaggccccgtgccactctggacacagggggaactcacaaatacaactggaatatcttaagaagggtgcgcccacccagtgcctcacacctgtaatcccactacattgagaggccaacgcgggcagatccttgagcctaacctgggcaacttagtcaagccctacctctacaaaaatagaaaaattagccaggcgcggcgggcacctgcaggcccagctactagggtgtgctgaagtgggaggatcacttgagcccaggagtttgaggctgcagccagttatggccgcaccaccgcactccagcctgggtgacagaggaagaccctgtctcaaaggaaataaaaaaaattagaaatacaaagagttaccaaggctgggtacagtgtctcacgcctgtaatcccagcactctgggaggctaaggcgggagaatcgcttgaggccaggagttccagaccaacctcctcccgtctctaaaataaaaaatgtaaaacttagctgagcatggtggcctgcacctgtagtctcagctactcaaagagactgaggtgagaggatcgcttgagcccaggagttcgaggctgcagcgagctacgactgcaccactgcatgcaccaccgcactccagcctgggcaacagaacaagaccttgtctctcaaagcaaatttgagagtcaccttttgtgctctcagagtacacatgaggctccgtgctcggcaatttcacagatcgcatttccttttcttaacaccccgtgaaatggtgccggtctcattgtgcccaggaaagtcaaggtcacgcagcaggtctgacctgggatttgaagccgggtctgcctcgcccccagcttatcctgcctcgcccaggctcttggcccctgaggacccacaagcagccatgggagcacacagggacagggaaggtgtgcagaggccacatgcccgtggtccacctgcaaaccgggacgctctcacgtggggatgcccgggagcgttgatgactcaggctccaggctctcctgtcctcaaccttggtccctcggctgattagatagtgggccctgcccgggcgaagggggaccccgccccagctgacacgggagcagccatggcccagacgagtggtaggaaggcccggcgtcatcgcacaggtgtttatggagcgcctgctgagtcgctgtcacttcctctcttccggaggtctgcggatgaccgctgagcagaccggccactcagcaggatggggctcacacatcccagccccaggatggccacaggtctgcttgaaccagccaggcaggcatctattaaactctgactgtgtatcccgtcttgtgcagggcttggaagagaaggaggccttggtgctgtctgggagctctcgatctgattaggaagtcaggaccaccccccagagacaagcaaacccagcagccgaggcgggggctggagaagatttggaggtaggggagcccagcagagggggtgggggcaggacccgccttggagatcctgccctccaaagtcagtcagttgtctgggctttttctgagaaaagcactctgtgctctgagaccttggcgaagccacttcatcactgcgtgcctcggtttccccatctgttaagtgggggcgatcagtcctacctcggaggattaaatgagatactgcatagaaaaagcctgctctgcacagcagcaggtacacgctaagcactcggtaaggttggccgataatattacaacgttttaaatcgccctagtgtttctaattcacagtttgctgacggcttggctgaggctgagccgggcaggctctgcgtatgtgaaagtcgccagcgtccaacccccggaacctgccggctgggaaggagaaagccgtccgctgcgaccgggcagctcagggtttgcagaaagggctccggcgcgcgtaagttctgtctacacgaccgccaaagcgtccggaacccggattcaggattcaagttgccatcagcttccagaaggagcttcgggatggggggtccttgaaggcaatggaggggcggcggggctccgggggaggcgggggttcagagggggctccctccccacccccgccggcgtcctcctcgccctgccaggccagggccagctgcaggtccagcccctccaagtcctcgccggtcaggctggggcgcagctcccggggtgcggcctcctggtctggcttcgggccaaacgcccagtctgcggcaagggagctggtgaggcaactccccggccccggccaccctcctctgtcccctcctcagctaggagaagcactaggatcccctgaccacccacccagggtgacccagcatcggccccagctgggtttcggtgggggcagctcaccggccaggtcgtgggcgaggtctttgatgaggtgcccgacgatggcgtaggcgacggccaccaccaccagcgcggccagcagcaggtacagcacgtacctgggcaggcggatgctgtccaggggcggcggccggtactcctcgtacagcggcggggacgggctccagccctcggcctccccctcggccgccagccccggcatggtgtccgcccggcacaggggaggcccggaggtgacccacacagcggaagtattaaggggctttgagctaagaggattgggcggctgccccacggccaccatctgcctgggttaatcacattgtaaatcacttccgcccacccgcaacctacctgctcagctccagccacgactctgcccagccgtccccacctcggggcctccgcacctgcgcttccttctcccaggaacgccctgcccagatttcctcatggccggctcactctcttcattcattcatctttttaattcttattattttattttatttatttaatttttcttgagacggagtttcactcttgtcacccaggctggagtgcaaaggcgagatctcagctcactgcaacctctgcctcccgggtgcaagtgattctcccacctcagcctccggagtagctgggattacaggtgcccgccactatgcctggctaatattattattatttttgagacagggtctcgctctgtcgccctgagtgctggagtgcagtgacgcgatcatagctcactgcaccctcaacctcctgggctcaagcgatccccccgcctcagtctcccaagtagcaggaactacaggtcctcgccaccgtgcctggctcttcattcattcatcgaatatgtattgagcagcgactatggctgggcactctcttaggtgctgggacacagctatgagtaagaaagaccaggccgggcgcaggagctcacgcctgtaatcccagcactttggaaggccgaggtgggcggatcacttgagacaggagtttgagaccagcccggccaacatggtgaaaccctgtctctactaaaaatgcaaaacctagctgggcgtggtggcgggcgcctgtagtcccagctactcgggaggctgagtcaggagaatcgcttgaacctgggaggtggaggttgcagtgagccgagatcatcccactgcactccagcctgggcaacatagcgaaactccgtaacaaaaaaaaaaaaaaaaaagaaagaccaaaacctgacattccagggagggagatggatgctaagaaagaaacataaccttagagtaaatgatatattaggttagaaagggaggtgtggctgggcgccgtggctcacgcctatagtcccagcactttgggaggctgaggcaagaggatcacttgatccagaagttcaagatctctctgggcaacatagcaagactgcatctctacaaaaactttaaaaactagccaggcgtggtgagtgcctgtagtcccagctactcaggaggctgaggtgggaggattgcttgagcccaggagttcaaggctgcagtgagctatgattgcacccctgtactacaacctgggtgacagagtgagactatctcaagaaaaaaaaaaaattgggctgccaaggcatcactgaggaggtgacatttgagcaaagacctggaggaaaaagggaaccagccatgggagatccaggggaaagagagttccaagcagagggcacagcccctgcaaaggccctggggcaggactgtgcctggcgtgttggaggaacagtgaggaggccagtgtggctggagcagagtgagccgggggagtgggggggaggggaggatggggagctgtcagggcaggtcctgcagggccgtgtagactgtgaggaagacttcggcctagaccctgaggaatgtgggagccatggagggctgtgggcagaggagggatgggtccggacccaggtgctcacaggtgccccctggtggctgctttggggagaacggactatgggggccagaggaggagccaggaggggactgagctggtcctagtggaaggaaagtaggcagatttgagatggacattttttttttttttttttttttttgagacagggccttgctctgtcacccaagctggagtgcagtggtgcagtggtgggatcttggctcactgcagccttgactgcccaggctcaagcgatcctcctgcctcagcctcctgagtagctgggactacaggtctgtgcccccacacctacctaattttctgtatttttttttataggaacagggtctcactatgttgcccaggctgctctttaactcctgggctcaagcgatcctcctgcctcagcctcacaaagtgctgggattacaggcatgtgccaccgcacccagccttgggatcgatttttcattaaaaaaatctgtttttagactaaatgcctgcaatgatggtgttgccatttcctgagttaggaacattgcagaggagaaacctggggagaaacacaaggaattccaagtagccaggggccagggaagccaggacaaggcagtaggaggtggtggtgaggaagacctgggttcaaatcccagctctgcccgtcacagcatgaccttggctctccagggttccctggcttctctctacaatggggtgggtaaagtttcctggggtgttgggaggaggaaattcaacaatgtgtagaagtgtgagccttcccgggcgggcgtggtggctcacgcctgtaatcccagcactttgggaggctgaggaacgctgatcatgaggtcaggagttcaagaccagcctgaccaacatggtgaaaccccatctctactaaaaatacaaaaattagccaggcgtggtgacatgtgcctataatcccagctactcgggaggctaaggcaggagaatcgcttgaacccgggaggcggaggttgcagtgagccgagatcccgccactacactccagcctgggcaacagagcgaaactccatctcaaaaacaaacaaacaaaaaaaagtgtgacccttgccaggtggtggctcatgtctgtagtcccagggacttgagaggctgaggcaggaagattgcttaagcccaggagctggaggctggagtgagctaagattgtgccactgtactccagcctaggtgacacagctagatcttgtctctacaaaaaagggggtggctttttattttattttatttatgattttattttattttgagacagagtctctctctgtcgcccagactggagtgcagtggcgcgatctcagctcactgcaagctctgccttccgggttcacgccattctcctgcttcagcttcccaagtagctgggactacaggcgcccgccaccacgcccggctaatttttttttttgtacttttagtagagacggggtttcactgtgttagccaggatggtctcgatctcctgacctcttgatccacccaccgcagcctcccaaagtgctgggattataggcgtgagccactgcgcccggtgagggtggctttttatatttttgtttgtttttgagacagagtctcgctgtgtcacccagactggagtgcagtggtatgatctcctcactgcaacctctgcctcccgggttcaagtggttctcctgcttcagcctcccaaatagctgggactactttccagggttttgttttgttggtggtggtggtgttcttttaagactccctctccctctgttgcccaggctggagtgcagtggggccatctcggctcattgcaacctccacttcccaggtttaagcaattctcatacctcagccttccaggtagctgggactacaagcatgtgccaccatgcccagttaatgtctgtatttttagcagagacaggatttcaccatgttggacaggctggtctccaactcctgacctcaagtgacctacctgcctcagcctcacaaaatgccgggattacaggtgtgagccactgtgcccagctttttcttgttgttttaaaaacattgcagctggtctgtgttgatgggtaaagagaggaaaccaaggaggcaggagagaaaagggggaagggctgaagtaatggctgtgagttgatgagaaggacgaggagttggtgaggaaaagaggtggctcaggcagccaatgtcacattggaaggtgccaccttggaagtggctccttcggccccagttgagccttcagatgaggcagccctggccgacagcttgattgcaacttcatgaaacacccaaagccagaaacatccagatacgcttgctgctcccagactcgtgacccacaggaaaggtatctgtcttctttcctctgtctctgggggttttcttgtcttctttatttaagatggagtcttgctcttgtcacccaggctggagcgcaatggcacacgatttcggctcactgcaacctctgcctcttgggttcaagtgattctcctgcctcagcctcctgagtagctgggattacaggcatgcaccaccacacccagctaatttttgtattttcagtagagatggggtttcaccatgttgtccaggctggtctcgaactcctgacctcaggtgatccacctgccttgacttcccaaagtgctgggattacaggtgtgagccaccgcatccggccttgtctttttttttttttttttaattaaagagatgggggtctcactatggtgcccaggctggtcttgaactcctgggcataagcgatcctgccttggcctctagagtagctgggactataggcatgtgcctctgtgctcaggtccacttttctgtctctgtaaggacactggtcattggatgtagggtctaccctaaatccaggatgatctcatgctgagatccttaacaacacctgcaaagactctatttccaaatcaggtcacattcatgggtaccaggggttaccacctggacaagccttttcgggggacacgatttgacccaagtccagctgtttgaagctgctaagtttggagtaatctgttgcacagccacaaggatcttaggtaagtcttggctagcagaaccaacagttcatcagccagcgttagcaggcaggaggggaggcagcatgcacggcacagggacaggcaggcgggcacagctgttggtggggtgtgcggaaggtctgcttgattttttcactgaagccgaaagcaaggtcatcagctgagtgaggatgagggaggttggaggccaacaagaaagtgacagaacagatcgcaagagagagagccccacggaaccatagtagaatggatgttggctgctcaggaggctgaggtgggaggatcacttgagcctgggagacagaagttgcagcgagcttagatcgagccactgctctccagcctgggcaatagagcaacactctgtctctaaaacataaacaagatggccaggcacgtggctcatatctataatcccagcactttgggaggctgaggagggcagatcatttgaggccaggagttcaagaccagccaggccaacatggtgaaaccctgtctctactaaaaatacaaaaatcagccaggcatagaggcatgtgcctgtagtcccagctactcagcaggctgaggcacaagaattgcttaaacctgggaggcagaggttgcaatgagctgagattgcaccaccgcactccagcctgggcaacagagtgagaccctgtctcaacacagaacaaaacatactgagaccccgtctctacaaaaaaatacaaatattactcaggcacagtggggcaaacctgaggtcccaactgcttgggaggccaagataggaggatcgcttgagcccaggaggttgaggctgcagtaagctgcagtgatcagccactgcactacagcctgggagacagagggagaccctctccatttaaaaaaaaaaaaagtgagccaagcgcagtggctcacgtctgtaatctcagcactttgggaggccaaggcgggctgatcacaaggtcaagagttcaagaccagcctggccaacatggtgaaaccccatctctactaagaatacaaaaattagctgggcgtgcatggtggcacgtgcctgtaatcccagctacttgggaggctgaggcaagagaatcacttgaacccgggaggcagaggttgcagtgagctgagatcacgccaatgcactccagcctgggtgacagagcaagactccatctcggggggaggcaaaaaaaaggctgggtgtggtggctcatgcctgtaatctcagcactttgggaagccgaggcgggtggatcacctgaggtcaggaatttgagaccagcctgaccaacatggtgaaagcctgtctctactaaaaaatacaaacaggccaggtacggtggctcacacctgtaagcccagcactttgggaggccgaggcaggagatcgagaccatccaccatcctggctaacacagtgaaaccccgtttctactaaaaatacaaaaaattagccgggcgtggcagcgtgcgcctgtagtcccagctactcgggaggctgaggcaggagaatggcgtgaacccgggaggcggagcttgcagtgagtggagatcgtgccactgcactccagcctgggcaacagagcgagactccatctcgaaaaaaaaaaaaaaacaaaaaaaaaatttagctgggcatgatggtgcatgcctgtaatcccagttacttgttaagctgaggcaggagaagtgcttgagcctggcaggcagaggttgcagtgagccgagatcacgccattgcactccagcctgggtaataagagtgaaattccatctcaacaaaaataataaaataaattaaaattaaaaacctataatcaaacatgtgacttccaggcaggtttctcaacctctgcactcatttggggccggatcattctctgttgtggggaccgagtgctggaggttatcttccagcatccctggcctcccccgactacctgactagatgccagctgcacacccccaccccccaccccatgacaagctaaactgatgccccggggcaggatccagcactccggtggagaacatggctcagtggatagtcggttcccgttgcgttttgcctcctgtcttctggttttggcctctctggctgcagaccaggagctctgcacctgagattctaccgctatgcctattttacagagaggtaagtgggctgtccccagccacacatggaagggctgcgggagccggcggaggaagccatgtctgggctctcagctggaccacagaaccccttccactgcacccacaacaggagctgggggaagacgggggtccgggaagggccaggctggagggctgtttccccagagcccacttggagggagctggctgggcagatctgaccaggtaaccgcacataaaacaggtgcaggcctgcctgtcgctggtggtggctcagtgtcagcagcaggacagatcctagagccaatggctgcggatacaaccgtctccccgcccagacgccacacactctcggggaacgttccctgaaagcccccacccctccctccctcccacgctcccctcacccaacacactcagaggagtcagtgcttggcaaaaataatttaatattccatctgggcagcgctctgaggtctgcttgtccctccctggcccctgtgccctacctgacccactcagggaccaccaccctgtccctacccaggcctcggggtgggggagtcagaggcccccagaccctgtgtcccattcctagtgaagctgaagccaccataacgtcagcctcttcccagagccccagctctgcccctggcttccctcgcgatcctcccctggctcccctcgcgatcctcccttggcttccctcgcgatcctcccctggcttccctcgcgatcctcccctggcttccctcgcgatcctcccctggcttccctcgcgatcctcccctggcttccctcgcaatcctcccctgtcctgagccgggcatcccagagcctcccgcagagtcccaccccaagcctggaaacttccacgctacagccctgcgccaggccccgaggagcagtcaggggactcagggagtcacagcacaacggcagctcctcggtcccagacggaggagggggacagcaaccatgcgcccagcaagacacaagcgatgacaccgatttacacacacccggtttagacgccaaagctctgcgggggaggagcggccctcaagagtcctccgggagctccgggtgagggtggggccctaggagggggccccgcgcagctgctccaggccgtccgcgtactggaaggcccgcccggtctcgtgctcatacatgtccagagccacctcgcagctctcacgcaccacgcgctctgggtcgtccgcgtgagcctgcagcgcggccaggcaggcgggccgggcaatggcgcccagggcctccgcgcactcgtgccgcaccatggggttctcggtgcatcgggccagggcggccgccagctggggcaccgccgcctcgtgctgcagctgtcccaggacgtagccgacctcgtggcggaagagggcgctcccacagtgcagacctgcaggggagagggacactcgctggggccaggaggggtgggaaggggagctctgtcttttcgaagacatggggtcttgctatcttgcccaggcaggtcacaaagtcctggcgatcttcccatcccggcctcccaaagtgctgggacgacaggcgtgagccaccacgcccaacctggggtgttctaccttgaagacacccctgcccccagccccagtgattagggatgcccgggggaactgaccgcagctatgggggcgggaaaagctgggagctatggggaccaagagggacgcttgcacgggttcttaagaggccccatgggaaatgcttggggccaggcccgggatgccgttcccgggggcaggccgcggccccactgcacagatgccatcactgaacctcacagcgaggcactgcccaggaccccaccccagaagcccctcctcaccctcggccagcgccagggcggcctcctcgcctcccgcgttgcgcagggcgaacatggcgcggtatcgctcgaagagcggccgggactcatccagcagcgcctcccgcaggcgccccacgtcacgctcctcagccggcggggcagggtccacggagaggtagggtcccgccgccggctccccgccgtgctgctgcagccactccagcctgcgcacggccagctggcaggtctcggccacctgcggggagggggtatcaggcagcgggttggccctggggggtcgcaggggcccttccccaccccccgggatggcagcttagcaggggagagagacactggcagggtgactaacccatcattccaggcaggaagtaagccagcaggggtggctgacttgtgagtgaccgggggactggagggctggggagggcctcagggaggaggtgatgtggaggcagagacctaagccagcttagggagggaatcaggtggagacccggggatggggaagcagcggtggaaaggccctgaggcaggaccctgcgggaggggtgagggccaaaggaacatgtgcggccccacctgaccaggtaaggcctgcgggccactgtaagggcttgggattttgtcctaaaggtgatgagatatcgtgagagctttaagcatggaacagaacagcagaattgagtgtcacacgtacccccggctgccccggaggaggagagactgagggtcggggtgggatgtggacaagaagtggcaggggagaaaggaacatgcatgtccgtggcggcataactcataacagctaaaaagcagagacaattcaagcatccagccacagtgagtggacacagcatgggccgtccacaccacggaacgtgactcagccacaaaaaggaatgacgggccggccgaagcggctcatgcccctaatcccagcagttagggagaccaaggcaggaggatcgcttgagcccaggagttcaacaccagcctgggcgacagagcgggacttcatctctataaagaaaaaactaataaaataaaaatttgtttcatttttgggccaggcgcggtggctcacgcctgtaatcccagcactttggaggccaaggcgggtggatcacgaggtcaggagatcgagaccatcctggctaacatggtgaaaccccgtctctactaaaaatacgaaaagatttgctgagcgtggtggcaggcgcctgtagtcccagctactctggaggctgaggcaggagaatagcatgaacctgggaagcagagcttgcagtgagccgagatcgcgcccactgcactccagcctgggcgacagagcgagacaccgtctcaaaaaaaaaaaagaagaaatgttggaaggtagcaggagatctctgaagaggtctggtgggccaggacaaggtatcagaggtagagggcactgggtgggttcagaggggtcttggcagagggactggacgtgggggttcagagaaagggggtcaggccggctcaggggctcaaggcccgggatggaagcgggtgagcaaagctggttgtcgccgttttgccaaatggggcgcagcaagtgtctgtccagattgtcgccctcgccttcctcatccctggggcatccttggccaagtggtcgccctggcaaccagagatggggagggtctgaggctgctccaggtcagggctggggcagggctgggcagggcttcccagggacccgagactggcagggagacaagcaggggcctggttacctcgatgacggggtccgaggaatactgcttcaggatctccagaacttccgggtccccgatggcccccagggcctcccctgggaagaagcagccggagagctcatgttggtggggtggatgtgtggaaaatgcccggctacctctgggaccggaggacacccctcccagggctctgccactgtggggaagccccgcctctgtccacggctgattggagcagcagtcggtacaggctccccgctggaccaatcagcatcccctccccagagcaaggcactgcctggaaccgcacctggctgccgctcagagcaaaatggaccccatcccggcccgtaccatgagacagggagacaagtatatccctacaactcgggatcacagctgacaagcagctccaagaacccaggaggtcgggggtgcagtgagctatgatcacaccactgtactccagcatgggcgacagagtgagaccctgtctcaaaaaaacaaacaaaaaaaattcccaaaacaggccgggcctgccggctggagactccagaatttggggccactggggctacacttaggtgggttcgggtacaggcgcaagtgcaggcgtcgcaagcccaggtcggagcaaggctggcggcggctccccgtagagccctgggtgcagatgttccttgaattttctcagaatcgagctcaagggccctgcctgtgaggcagctgagctggtggcttttgcctttcctgaaggttgcggtttgcgtttgtgcacctgcctggcaggctccctctgccgggaaaagtcccgtatgcgccaacacaggctctgtgtcaggcacctcccacgcgctaattgcaaatgagctcactggttacagaaacacagtcccagtggcacagacgcaccaactacctgcctcactggtctccttcgctgtctaggtccctcgctacaacagtccattttttttttttttttagagcttcgctcttgtgacccaggctagagtacaatggcgcgatctccactcactgaaaactccgcctcctgggttcaagtgattctcctgcctcagcctcccaaagtagctgggattacaggcgccggccaccacgcccagctacttttttttgtatttttagttgagacggggtttcaccatgttggccaggctagtcttgaactcctgacctcaggtgatccacccgcctcagcctcccaaagtgctgggattacaggcgtgagccaatgcacccgacctgaacagtccatttttttgagacagggtctcactctgttgcccaagctggagtgcagtggcatgatcatggctaactgcagcctcaacctccctggctcaagtaatcctcctgcctcagcctcctgagtagttgggaccacacgcgtgagccacgatgcccggcttgtatctgtattgtcactgttttgtctcttactacatgacagagcctggcatacagtaggtgctcactaaatgtgtgtccaatgagtggagtaaatctaatatacattagggattggggatctatggcttgtcgcttgtttttatacgagcaaagaatggtttttaaaacacttttaagggtttaaggcggggtgcgatggctcatgcctgtaatcccagcactttgggaggccgaggcaggtggatcacttgaggccaggagttcaaggccagcctggccaacatggcaaaacccatctctactaaaaatacaaaaattacccaggcgtggtggcacacacctgtaacgctatctacttgggaggctaaggcaggagaatcacttgaacccgggaggcagaggttgcagtgagccaagacggcaccacagtaccccagcctgggcgacagagtgagactctgactcaaaacaaacaaataaatggtttaaaacaaaaaatcaaagggatagtacttcctgatgggtggaatttatatgaaattcaaatctcagcatttacaaatgaagtttgttttttgttttttcacagacaggatctcactctgttgcccaggctggagtgcggtggcacgatcatggctcactgcaaccttgacttcccgggctccagcgattctcccgcctcagcctcccaagtggctgcgactacaggtgcatgccaccatgcctggctaatttttgtattttttctagagacagggttttgccatgttgcccaggatggtcttgaactcctgagttcaaacgatccaccttcctgggcctcccaaagtgctaagattacaggcctgagccaccgccccctgcccagttgaggttgtctgggcacacagccttagccatttggtgacagatgacctgcgctggctttattgagtcgctgtctggctgcagagctgcaggtatttactatctggtgctctatggggcagttgaccactctgatatttatcacctgagtgaggaaggggacacgtggggtcatgaagaagtgaggcaggagggagcaggtgcccgggacacagacaggtgctcacctgcctcatggcgcaccatgggctcctgacgggtgtcttgcagcacgtccaccagcatggggatggcgcgggcatcctgcatctggcccaggcagtaggccagctcgtgcttgagcagggcggaatcgtcatcgaaggcctggctgatccatgcaatggcgcctgggccgccgagcccacgcagcgtgaacagcgcccggaagcgggcctgcaggggctgcttggggtccaccagcgtctgcccgatggcatccacctcctgctccgtcaccatcgtgctgtcaatgggtcccggccttccacaaccctgctcaggctaaacctggggacgcggggatgtaagaacctgtggcagaaaaatgagagcccaggttagaagcccccttcaccagtgcgttgtctgttcctaggacctgggtggggcaaattcctacccactgaccaacctgagcatctacgctgaaagctcagctccaacctccctactagctgtgcagccttccgtaagttgctttccctctctgggcctcagtctctgcactgcctctcgcctataggcctatcagaaatgacctccactgtctgctctccacacagcagccagagggacagctgacccccaaaatggccctagcgatccccacccaatattcaaggctttatatagcgatccccacccaatattcaaggctttatatagtcctctcccactctgaacagggctgacccatgtgaatgccaagaagatggaacagagcaagacttccaaggttagggcataaaaagcacaacagtctcatccttgttctctctctaggggaagccagtgaccatgttgtgaggatgctcaagcagtcttttgtaggggcccacgtggcaaaaaactgagccctcccaccaacagccatgtgagagaagtgggctggcagcagctcgtccagccccaagcgaaccttcagatgatgcagccccagagcgtctccactgaggccttaccagaggccagacccagagccagccagctaagccaggcccagagcaactgtgtgcgacactgtttactgttgttgaaggtaaccaagtatgtttttttgtttgtttttgagacaggatcttgttctgtcgccaggctggagtacggcagcatgatcacggctcactgtagcctcgaactcccagtctcaagtgatcctcctgcctcagacttcctagtggctgtgtctacaggcacacaccagcatgcccagctaattttttttttattatttgtagagatggggtctcacttctatgttgcccaggctggtctccaactcccaagctcaagtgatcatcctgcctcagcctcccaaagcattaggattacaggcatcagccactacccccagccattatggggatttttgttacacagcttagataacagattcagaagtactttcaatatgtaaactggaccatatcactcccttgcttaaaatcctcctatgcctcctcactcaactacttgacagtcccaaaggcccttcatgaccatctcccatcacctcttccctctctagctccactccagccacacaggcctcctcgctgttcctccaacacgccaggcccagtgcagccctagggcctttgcatttgctgtgatctccatgaggaacattcttccctagatgtccccacgtagcaggccaggcctcactaacacaggcctccataactgtttcagcactgactgagtggttaagttaaacattaaaagctaaaagagccagtgccctcatacaaaggctggaatgtaacaaaagcccatgaagagttttgcccaggcctttcctgggccttaaggcatgacaagataatgaaggaatttttttttttttgagacagagtttcgctcttttgcccaggctggagtgtagtggcattatctcggctcaccacaacctatgcttccagggttcaagtgattctcctgcctcagcctcccgagtatctgggattataggcatgcaccaccatgcccggctaattttgtatttttagtagagacagggtttctccatgttggtcaggctggtctcgaactcccaacctcaggtgatccacccgcctcagcctcccaaactgctggaattacaggcttgagccaccacacccagccaataacgaaggaattcttaatgtgacccgtttaggatgaaacaagttttactgggtgtctgaagaactccccaaacctccatgatttagcaggagacaagataaggatgatcaccccagcacctggacccactggagatgagataagggtgatcaccccagcacctggacccatttagattaagtaaatttactgaggttccaaaggaaagtcttcaggattcagatcttagttatagattaaaagaagttagtcactttaagtctttagatggatgctcagttacatgtagatggagagcttagagggtatataagctctggaaaactttgtcattttgagttggtctggcgatattttccaggccttctccctgtaaccggttacagaaataaaaactctcttcctccccagttaatctgcatctcgttattggaccatgagaaatagcagcccgaccctcagtttggtccaggaacacccgtgctcatcctcttgctttcctgggtctccaacatcacttcctcatggaagccttccctgatcacaatggacaatgttactcttccatctcttttcacttattcagctttatttttctccacggcgcctaagactcctagatatcatattggaaagtattggtttagttgcttgtgattggtcttatccctcattagaatagaactctgaaggctgggactgagtctatcttggtcactgttgtattcccagcacttagtgcaatgacctgcacgcagtagggcctcaataaaaacaataaccggctgggcgcggtggctcacgcctgtaatcccagcgctttgggaggccgaggtggacagaccatctgagttcaggagttcgagaccagctgaccaacatggtgaaaccccatctctactaaaaatacaaaaattagctgggcgtggtggtgggcgcctgtaatcccagctactcgggaggctgaggtaggagaatcgcctgaactcgagaggcggaggttgcagtgagccgagatcgtgccattgcattccagactgagctacaaagcaagaccctgtctcaaaataaataaataaaataaaaacgacaaccgtgacaatagcagctgacacttatgtagcatttgctacgcgccaggcactccatgctctttacattcattaattcattcgatctacatcactaccctgtgaggtagttactaagattgtccccattttacaggtgaggaaactgaggcacagtttgggactgtgcttgggaacttgcttgggagcagcgtgaagagttaggaatccaggaagtctggctccagagtcgggctctaaaccaccaacgctttgttgaatgacttaggataaaagaacacagccaaggggagaagggacccctctctttccagatcggctgagaacctggcggatgcttcatctcaagacaggctggctatggcatgctggcagccctctctggtgaacagtggcgtcagcaaggctgcctgggcttgacgagggcagtgtagccacctaagcacaggtgaccatcaaaggagagtgacacctttaaagaggggtcatcagaaaccagagggcaggcctgtgcgagctggcagggcactggggaccattgagacccaaccgtacgacataggagcttcaggacgtgaggtgggcactctttcatgtaaaaaatcccagaggaaagagatcgccgggactcgagaccccttaacccgccccatccacagtcaacgaatccctgagaccggattccctaacgaggcgctcccggtgccaccgcccgccagacccgggccccacaccgtgatcgccgcctccgggacgcctcaccgagctctggagactcaggacccgtcggcccggccagtaaccgcaggcgcctctgccaccaccgcttcacctgccgcgacgcccgcagtgcggtctgggggccgccattttctcgcccacgtgaccgtgccggacggcaccaacgcagccgcgggtgagacctagtgagaggctccgtgcatgagggaggcccggaaggctgagtcggtgctggtgccacagctcatgcaaacgcaggaacagtattcctagtgcgttcttcggggaaggggacgggcaacgtatgccctttcatgggaaaaaattctctccaacctccccactgcggtacaagaagtgagactggtttgtgccgattcagcgccctgcctgggctggctagcaacggagcatgcgcagtgtttctaggcgtggtcagactccagaggtgttggccaatgggctcagggagctcgaaccttaagtaggtgaggaataaaaaaaggaagaaatgcagtcgttcattcattcatgtatgtaataaatagtacatggccttgaggacaagagagccttcagcccttaccctcgtacgcctcccagtgttgttatagagacagaaaataacacgataagtaaatgcaatacctattagatggtgaaaaaggctaacgagaaaaaattcggtagccaagggcggtgtatgtatagggtgtgcagtttcaggaagggtggccagaatctgaggtggtgacatctgaagaaagacctgaaagaggccgggtacggtggctcacaccggtaatcccaacactttgggaggccgaggtgggtgttatcacttgaggtcaggagttcgagaccagcctggccaacatggtgaaacccccatctctactaaaaatacaaaaaggcttcagcttcccgagtagctgggattacaggcatgcaacaccacaccagctaactttttgtatttttagtagagacagggtttcactatgttggccaggctggtctcaaactcctgacctcaggtgatccacctgccttggcctcccaaagtgctgggattacaggcgtgagctactgtgccctgcttgcaatctcttatttttaaaatgtgggtgactgccaggagtggtggctcatacctgtaatcctggcactttgggaggctgtggggtgagaggatgatcgattgagcccaagattccaagaccagcctgggcaatgtggtaagcccccgtctcaacagaaaaaaaattttttttaatttggctgggcgcagtggctcagcctgtaatcccagctacttgggtggctgaggcaggagaatcgcttgagcctgggagacacaggttacagtgagttgagatcctgtcactgcactccagcctgggcaacagagcaagactccatttccaaaaaaaaaaaaaaaaaatcaactgtgcctggtggctcatgcctgtaggcccagctactcaggtggcttgatagcttgagtccaggagttcaaggatccagtgagctgtaatcacaccactggattccagcctgggtgacagagcaagaccccatctcaaaaaaaaaaaaaaaatgagcaattaataaaaaaacatggctgggcattgtagctcacgcctgtaattccagcactttgggaggccaaggcaggtggatcacttgtggtcaggagttcaagaccagcatggccaacatgctgaaaccccatctctactaaaaatactaaaattagcttggcctagtggcgggtgcctgtaattccagctactcaggagtctgaggcaggagcatcacttgaacccaggagacggaagttgcagtgagccaagatcgcgtcactgcactccagcttgggtgacagagtgagactccatctcaaaaaaataattaaataaaaattaatgaaaaaacataaaatgctgtgcatagcaaagaaatccttttggaaggccaacttctattttaagacaacattcacaaatacttattgagcaactactgtgtgctggacagtgtcctgagcacagaggatagtgtcctgggcacagaggacacaggacaaaacagacacagtgtctggcctcatggagctgacacccccacttttatttttttgagacagagtctcgctctgtcacccaggctggagtgcaatggggcgatctcagctcactgcaagctccgcctcctgggttcacgccattctcctgcctcagcctcccaagtagctgggacgacaggtgcccaccaccaagcccagctaatttttttgtatttttagtagagacggggtttcaccgtgttagccaggatggtctcgatctcctgacctcgtgatccgcccgcctcggcctcccaaagtgctgggattacaggcgtgagccaccgtgcacggcccaccccccctttttttttttaaattattgtattgccttcctatgtgttggaaaactgactgcagataacaggcatcactgcagccctcagctgccttgcgaggacgtcatctcaacatgtttgtggctcaggctgtttacggaggacttcccgtggaccaggagctgtgctgactcaggaaggctacgagggcagggtgccaggtgtgactggccccaaggatgctccccaggaggagataatcccagggtgcaggacgcagatatcgaagcctcagccaaaagcaaggcctgtgtaagtcagagaacttggcatctggcctctgtagaccttcgagaaactgatagcacagaagaaccaagtctgcgtcttctgttcggtgggtcctctgggattgagcaagtccctggggggcggaagtctggaatccaggtatctgcagatctgtggcctctctggaggctccaggggaggatccttcctgcctcttccagcttctgggggtggccgccagtccttggtgtttctcagcttgtggcttcgtcactccaatctctgccactgtcatcacctggccttgacccctgtgtgtctgtctctgtgtttctgtgttagaatctccctctcctctccttttattttattcttctgagacagagtcttgctgtgttgcccaggctggagtgcagtggcgcgatctcagctcaccgcaacctctgcctcccgggttccaacgattctcctccctcagcctcccgagtagctgggaatacaggggcctgctaccatgcccggctaatttttgtatttttagtagagatgaggtttcaccatgttggccaggctggtcttgaaggcctgacctcaagtaatctgcccacctcggcctaccaaagtgccgggattacagccgttagtcactgcgcccagctcctctttcagatctttattaaaacatcatctttgcaataagagcatccccgagcactgcatctgaaactgtaacctcttgcctcctccttttccctgttctcttttctccttaactcagctccaaaggggatttttttttttttttctggagtgcagtggtgcaatctcggttcacttcaaccaccgcctcccgggttcaagggattctcctgcctcagcctcccgagaagctgggattacaggcgcgtgctaccacgctcagctaatttttgtatttttagtagagatgaggtttcgccatgttgaccaggatggtctcgatctcttgacttcataatccgccctccttggcctcccaaagcactgggattataggcgcaagccactgcgccgggcaagaactttttaaataacagctgtattgagatatagtttacatactgtacaattcatctgtgtaaagtgataattcagtggtgtttagtatattcagagtcgggcagccatcatcacataaattttttttttttttttccgagacggagtcttgctttgacacccaaggtggagtgtggtggcatgatctgggctcactgcaacctacacttcccgggttcaagtgattcccctgcttcagcctcccgagtagctgggactacaggtgcgcgccagcacacccggctcatttttgtatttttagtagagatggggtttcaccagattggccaggctgatcttgaactcctgacctcaagtgatctgcccgcctcagcctcccaaagtgctgggattacaggtgtgagccacagctcacggccatcacatcaattttagaacatatccatcaaccccccaaaataaagtccattccagtcactcctgatccccctctcccagcccttggcaaccactaatccacttcctgtctctatggatttgcttatctggacatttcgtatcaatggaatcactcactatgtggtcttttgtatctggcttctttcactgggcatgatgctttcgaggttcatccaatctgtagcctgtgtccgagcctcattgcctcatattgcaaaacaccgtgtcattgtatgaatggagcattttcccttcatctgtggatgtacatttgggttgtgtgcactttgtggatgttatgaataaagctgctatgcacataggtgtgtgagtttttgcgtggatgttacatgtttgtttctcttgggtagatacctaggagtgttactgctgtgtcatgtggcaattctatgtttaacctttttttttttttttttttttttgagactgagtcttgccctgttgcctaggctggagtacaatggtgcgatcttggctcactgcaacctttgcctcccgggttcaagcaattctcctgcctcagtctccccagtagctgggattacaggcgcctgccacgatgcttggctaatttttcgtatttttagtagagacggggtttcactatgttggccaggctggtctcgaactcctgacctcaggtgatccacccacctccacctcccaaagtgctgtgattacaggcgtgagccaccgcgcccggcccataatttttttaaaaacctgttttttgttttttttttcaagacgtagtgttgctctgtcaccctggctgaagtgcagtggcgcaatctcggctcattgcaacctctgcctcctgggttcaagggattcttctgcctcaacctcccgagtagctgggattaactccgtacctcaggtgatccgcccgcctcggcctcccaaagtgccgggattacaggcttgagccaccgcacctggcctaaaaacctgttttgttccctgctgtctcactggggcctggaggagcagcacttaggagcgcaatgcaggtttgttgaataaattaatgactctcagcagtgacgtttgtacgttcgggacacgcacctggtgttgggtcccatctgcgctcattaggcgcgacgtcaatgccgcactgaggtgtgcctggcttcgatctaccctaggaagggtctgccctggggcgccccattccgcgactgtccccagtgggaaccacgccctccatctaccagagccatttctgcaacgtctagcaccccgcgggtcctcttccggccgcggttgccctgggcaacgcgtggagccgcgcttcctgtattgatttgaatcgcgggagacgtcacgtcctcccgagatgcccaacgcgcgcaggcgcagccactcggagtgggcagggcctggctgggtgttgggcagggcctggcggtgtgtggggtaggcggggggcgtggccgcgattagccgcgcgcggcgtgggggcgtggtcgggttgcgggggtgcgcgcggccggccgggcgcgcgcggcggagggagggagccgggaggcagcggaggagcgaccgccgccatattagggaccgcggagcccgggatcccgtcagcggcggccgcggccgggcctgcgggagctgcggaggccggaggcgggcgctgtgcggtgccaggagaggcggggtcggcgggagccagcgagccacgggagcgagccaggtgaggcggccggggtcggggacccgccccccgggccctaggcggcggagcttgactgcgaccccccaaaaccgggacggcggggcgggctgcgacccccaccccagctcaggcccctccaggagcccccagtcccctcgaatgccgcctcccaggccgaactaggcccgggtgacctcagcatccgcgtctcccgagttaacacccaaatcccagcgtcccccccacgtcggggcctgccgtgacccccaccccgagccacctgtaagtcgtgacctccccgcagccgccgtcagcgtccaccattctttttaaaataggctgagccctgcacccccaaccaggggaccccactgcgcacccctagaacagcagaccccgcctcctaacccgggtgatttctccctggcctgtcatccccgggacttcccagttcagaccctcccagcttgggtcctgcccacacgaagccgccccccatcgctgagcctgtggtgtgcgatggctcgcccaggccgcaaccagcccctcgccccagtaaaatgcagtcccagcccgggacacccggaaacctgtgtctgtggtcactgttgtgtccaccagtccccgcaggcacgggttgagtgcatggatgtccccgtctcacctcatctcgctgatttctgctcccccaccctcccagcgtgccccctaccagcccccattcccccgaaatccagctctcccaccaaagcctcagacgagctatccgtgcacaagcccctccctcctccgaactgaacctccgtcctgcgtcctgccccgtgtcttctccaaacgcaagcctggccatctcggatccccagaatatggagtgtgccccccattcagagccgttttacccctactcaaacctgtgacaccccctccccctcttccaccgtccagacctgtctccaccccacgtcctgagacccccgatatgcagatgttcagcctaaatctgttttgtcttttcccctgttttctccaccccaaactcatcctctggttcagggcgtctctctggttccgattcccccgccccgccccagtctaccgggcgatgacctcatgcctctccgtggtgaggcccccaccccaacctatgtgctttgaaggagggtgatttacctaagggaaaaccatccaccaaggacacacaccaccagcatgagggcagcctgcggggactttgaagtgaaggcggagtggtctctctcggggtgggggtggggatagaagctgacggcatcacctaggtttggtccccggagtggatgtgtcgggggccgtctgtcatgcggaattccgcgtgggcctcctcctgtgtcaggggcccgtgtgttttggcgacacccgattgtcatttccttcggaatcccaagtggaggcaggtgtgctggccactggccgctgcccggcgccttgagcagcgagcggagttgggttgcagagggttttgctaagggagcagacacttactcaaaggcaagcccggtgctttactggggaggggtatcttggcaaggtggtacccgccagtttgcccctgtgacttgcttcccaggtcaaatttcagaacctgtgccctggctgcaggcagtggtgggggtaggggttggggtggggctttggggtttggaggaggagtttctagaaacagacaagccggattggtcttcaaggtggggctacattgattttctttttttttttttttttttttgagatggagtttcgctctgggctgaagtccagtggcgcgatctcggctcaccgcaacctctgcctcccaggttcaagtgattctcctgcctcagcctcctgagtagctgggattacaggtgtgcgcaccacgcccggctatttttgtattttaagtagagacaggttttcaccatgttggccaggctggtctccaactcctgacctcaggcgatctgcccgcctcgaggcctcccaaagtgctgtgattacaggcgtgcgccaccgcgctcggccttacgttgattttcaaaccacttactgtttaatggggtttctggtagaggggttttgtagactgagaacttctgggtttgggagtcccagaatggaattggttctgaggaccttttgcttggtgtcatttagaggggagaggatggaaagtctgtgtgtgtagggccgctcccggggactccaggcagaggtgaagatccaggggcttggtcttctaggaactcagcgctgtcactcctttctcctggcgcaaagctctccactgcccaattctgtccccaggggacatttggcagtatttgagccaggcatgctgctcagtgcccccactgtgcccagaacggcccagtacagaaagcagcctgtccccaatgtctggactgtgagccccgtgagggcagtgagtgtgcctgcctggtccccgctccgcctccggcctgctcagtgccctgggctgtgtgcttgcccacagcgggccccctgttggcactgccacagggacctgggcacctaccagcaggaaagggagtgtttgacctcatctctcttctgcccccgacacctccctgtggtcaccagtgacctgctcgtcaactccgcttgtcactgccttgcccacatgtcactgttcttcccagccactggactcagcacagagccagagccccttcctgggccacttatgttctcgtccagggacgttcatgtccccagtggccccaggtccctgtgtgcgttggcaggtgactgccttcctctgcctcagtgtcctcattcatggatgggatgaggggcacacaagcagcctgcctggccgcgcctcattcagtcactcagccgccactgaccacgaatgacacaccgcccccacaacggtgaacacccccactctctcttggcttcctactccgtctggttcttccttcaggcttcttcactggcccttctttctttatttaatttttgctcgtagtagctttatttggatacacttctcctgccgcacgattcactgctttagagcgtgcagttccctggtttttatatgttcacaggctcgggccgccatcacctctgcccaattctggagcattctcattccctcaggaagaaaccagccttgaccccatcagccgccaccacctgtctcccctgcctctgtggctgggcctgtcccggacatttcatagaaatggaatcccacattgtgtggccttttgtgtctggcatctctcactgagtgtgatgtcctcaaggtgcgtctaggctgtggcctgagtcagagccctgctctttgtcgtggctgagtcatgttccgtgatgtggaggcaccgggttttgtgcgtctccttattcagtggacgttggtgctgtttccagtgtctgcctgttgtgagttgagctgctgcgaagaggcaggcgctggtggttgtgtggcgaccgtccttgttgctctgtgactgaggcgctggtgcctccactcgccggctgatcgtgtctgatggtgtcaaccccatgcaaccaccgtgagcccagctctagagacctgccttccaacctttccaccttgtcctcctgcccccagcatgtcccttccaccccagccttcccaaattgctgcacggttctgatttttttcttttttctttttcctttttgagatggagtctcactttgttacctaggctggagtgcagtggcgcaatcacaactcactgcagcctcgaccttccagcctcaggtaatctgcccacctcagtctcccgagtagctgggactccaggcgcgccaccatacctggctaatgtttgtattttctgtagagacggggttttaccatgttgctcaggctggccttgaagtcctgggctcaagtgatcctcctgccctggcctcccaaagctctgggattactggcggagccagcatgcccggccacactgctgggttctggagagcggcaggccgttcagattcctgtgctgttttgcacacattcccttctgttgtgaatcttcctctctcccagatcagatttggcctgggaacctctatattctcatccccaccagcctgcaggccactgggtcggtggtggaaggatgatgggagcagagagagggtgggcagtgggcatctgtctgctttcaccggagggctgaggagtgtgggaggccagtgctggtctgtttgccctggagagcaactcttccacttaaggatccccctcaggatccccctcatccatgcattccccacctgggtgactccgcccccacaggcactgggcaacacctcgggacatctgtgcattgtcacaactggggggcgctcctggcatggagtgagtggaggccagtgatgctgctcagcgccccgcagagcccaggactccccgccatagacagcgttccggcccaaatgtccgcagcgctgaggttggggccctcgccatgaactccccggactgggtttctattgctaccgcctcacctcgcctgggacccgtgggtgggagctgcatgacacagacagagatgcagagatgtgcgggcctcgggaacctgatggcgctccatccgatcctgagagaccacaggcgtggtgccacgctgccttcctcctcacgtggggcactgcagccttttgtgctgccgcagacccaggtgtcttttaggtctgaaggtgtcatcaagtcagacagggctgtgggtactcggtggtaccaggaggctggagatgagcaacctcgggtcttttatctgcaggcaccatttggaagtgtggagagcagttctcacgggagtgggctggaggtgggagctgccccccacacagggaagagggtgagagctgctggccgagtagaccctggggatgcttctcatccactctagactgctattcactctagactgcctgccggctgggtacagaggctcacgcctggaatcgcagcactttgggaggcctcagcaggaggattgcttgagcccaggagtttgaaaccagcccgggcaacatagggagaccctgacccccatctctatattttaaaaacaagaagagaaaaataggctgcacacccagtgggggcagcagcttggctctgctttgcggcgcctgggtcagcacctagaacccacatggcacatggctggttggtggggaggcgtcggctggcaggtggcggcgtgagtaaatgaatgaatgacgtgcacggggtgtattcccggggcccaggcaccggcctccaacagtaactcgcctcgccatggctcacacgggcaccctggaaggcacgctgtcccctgccaagggtctgggccccacccttttttacttggctactcttggctgtgtctttgcgtttgtagaggtcagaggccgccagctcagcttgttcttctgcaggtgggggttgctccctgcagagatctctgtgcctcagtggtctctccgctaggccccggctctggttctggtccagagtccacctctcccctgtgtcagtccacccctgcaaccacggccacctgccccgggagccccatttctctgacgtcctccctcctctctgagactgatgggggcagcatgggaggagataagtgtcatggtctgtggacaggaggtcactggggcagcatcctggctgccaaggcaccgccatgcccaaggacgaaggagcagggagcagtctggggacctgcgtacccctgtcatgagtcccgggcccagccagcatccactgagcacctctggggccgtgtgtgcacctgtcatgagtcctgggcccagccagctctcaccaagcatcttctctgggtcatgccgggtgcctgctgcctcgtagacctcatgcctgatttcacagcttcctaggcaggcagtgttgtccctgcttaactgatgaagaaactgatgtcccaagaggtgaagctgcccaaagcttcgtggccaggaagggttgaagctgggactcagcctgggctgatcccgtcgaaagcccacactctttctgatggaccctgctagaaccttttcatgggacttggtttactttcatgggagggcacaaggagggttagcgataagggtgtctgggtgcttcgcccgccttgggtccctggagctgcagggctgagggccgcgtgtgctgggtggggtggtgctggtggggggctcacgtgctctgacaaggccatctatgcagctggcacggctgcccccttaatcacatcatgacaccgaggacatccaaatgtgacccgagagagccatctagagtcctcctctgaggagtggctgggaatgagattagtgggatgaggtgacgcttgtgaagccgtgcttcataaatgacactcctgggcgcagggcaggaggcaaacctccccagaaactcccagatccagtgagagcagacagcggatagctgggtgaccccccatttttttgtggggggtctttcttatctggtgcttctccctagccccgcagaggatggctggacatcacgcccaggcacccagcgcagtcccttgcctttcacatgaggagggggctctctgggagggcacctgggccagggcctcacaggtggtctggggacacctgggacccctcaggcaggagcactttgcaactttgcaggggttgggacctgtgagggctgttagccagcccaccccctggctctgtcaccgccatccagcaactttgcaggggtcgggacctgtgaggggctgtgtcccggcccacccccgagctctgtcaccaccatccagtgatccttagtcggaggcctcctgctggaaccactctgcggagactccagcaggaggcagtgccttgcagcttccccgtgggcagggctgggccgagtgctgagtctaggacacttcgcctcctggggcaagggccagggagtgggcacagagccagacccagactggctggattcacgtcccagctctaccctcaccaactgcatggggaccttgagcagagggtgctgtcccaggccccaagatgcaatggcgcctgcccacctgctgtcccaaggacattcagtcaagcacactgagtgcttccagctgtgccagctggtaggcacgggcaaggtttgcctctgtcctagccccatgtgtgttctgatgctctgcccctgggccaggagcccgcacgggatgtggcggcacccatgaggctctggtcggtgttccctcctcccttacctgctccacgtcccctgtgggtagcaagtgccgcctcacctgcaggctggagttacccttacccaaggcggtcctgccccagtgtccactgggccagggtggggggatgccctggtgtataccataggtggcacatccagaccatagtcagcctcaacacatgagtcataaaagatccgtcattgggatgtttcaattccttttgtccgttaaagagcctgaaaaaaatatgaaaacagtggggaccagttttcccagccaagcaaggcgttgcaggagtaggagcttggctgagcctccaggaaccagagtgctgtgttcctgaggaagatcccgcaccaggggagaccttgggggctttgcattggtgctgttcccaggccctgtctacacggcagacagcccctcacgctttgcgtccccactcagggacacctcaaagtcgagcctggagacaaatcgtgccgtgccattggcccccacaaacagtgcctcatcggctccctttcctcctctccccactggtgcagtggggatggggctggggatgcctggccacactctgcaggtctcgctcattcaagtcacttccctggttttgcccgagagcagggtctctgcccttgcaccctgtggacattggggccggatcgttctctggggtgcggccgtcctgggcactacagggtgctgagcagcgtccctggcctccacccactccacgccaggggcacccccagtcatgacaaccacagatgtccccagacatcaccatatatcataccctgggggcagaatcaccctggttaagaccccctgggttatgggattccatggacccccaagagactctgcgtcccatgatcctctgccctgctgaggtcccaggaggctgcacacattgaaatccataccctgagtgggagggagagaggaggtgaatctcaggagctggagtccccctggtttgtgctgtctgccccatcggaggcttattctggtgtctggtgtgagcaggggccgactccatttttttccacatatttatcccagggcgtctccctctgtacgggggccctgtcactgttttgtcaggtgactgggtcatgcccatttcccaggggaacaggaagaagctcgagactgaaggcttgcccggggcagtggcagaaggaggcctcctggctcttcattctggggcccagggggtgaaaggtggaccttccctatgagctggcccagggggtttgcaggacccacagggcagtgccctgccaaggggatggggcagcaggaagcccggtggcccagggcccgggtccaccacccagaccagggcaaccaagctgcaggtgtcggccacacaggcagagccacagcagcatccccactaggcacccccgggccagggacaagaacctctgcagggcctggcggagcacgagtcactcactgattcactgctgatgtgcagcgagggtccgggttgctgctaaactccctcgacccggtctgagcctttccacacggccacacacgttgtctgtgctcaggaattacttaacagcagcttaagatcctgatttctctctactctaaccttttacgatgaaaccttccgagcatccagcaaaggagggagaatgcggtggtgcccggtctcatccggagcctgcctggcccatctctgaccgtggtttgtttttttgaatacctcacagttcacgtgatacagaattctagaagtacaggccgggcgcggtggctcacgcttgtaatcccagcactttgggaggccgaggcgggcggatcacaaggtcaggagatcgaaaccatcctggctaatactgtgaaaccccgtctctactaaaaatacaaaaaattaggcactacagtggcgggcccctgtagtcccagctactcgggaggctgaggcaggagaatggtgtgaaccaggaggcggagcttgcagtgagcagagatcgcaccactgcagtccagcctgggtgacagagccagactccgtctctaaaaaaaaaaaaaaaaggaattcaagaagtacaaaacgaggtgccaggagaaataaggcttctttcctccccaatcctcgtcctctccttcctctccccacccaccccatgaccagccgcttttcgaaccttctgggagcagtgtgctctgcatggccatttttctgtgcagtgggtctcacagcctcttccgctccctgtctgatggcctcttgcgtcttccactctgactagctgccgcagtgactccatctctgcacacatgcatgctgagtttctaaggataaattcttagaagtagaaataccgcatcacagaggatgtgcattttttaaattttggaagcagttgccaaattgccttcctttgaagccgtagcagtttgcagcttctgccaaccatgagtgcgtgtggctgtctctccccacgcctgggatggtgaggccgagtcccccagcccacagcctcccccaccgtctgacgggcgggagggtggtgtcctcggttggattggcagctcctgactgcgagggaggactggtcctttcccagtgcggtttgttggtgtcctttgctactttgggctctcctgtgggtggcaggtgcttccctcagtttgtcatctgttttttaactgtgttggtggtgtgtctgccctgcggactcccaattttcccggtgttgaattccacagccatgcctcttatggctcctggattttgttcttcctgcagcgcagctgagcgaggggcttagaggggtcgctgggggtcccggagctgagctgagcaccgctagcagcaccgggcaagtgtccaggtgaggtgccccgggaggccccaggcccgggatacaggaccctccagatctcggaggtgggaagacagtctgcacacccgtcttgtgcacccctgccctcactgcagggacagacaggagctgggtctcaggctgctgggcaggcctgggccctgtggttttgcccaccagccttgggcagcgttgagtgagttgtgtggccagtagactgacagctgctgcccacctggcaacgtttgggccattggctcacggcgtctctgttgccccggagggcttgtcaggtgcagccatgtgctgctgggcagcgatgtgtgccaggggccgtgtgcagctgcagctggcgcccggtgtatttgctttcagtgctgacttcagggcagcatcagtgttctggggaagtgggggatgatattttagccaatcacaaccagactctgccagcaagtgcctcagtgcacgcggttaccaccgctgctgccagtgacacttgtttacattctctcattctggaaaaatgccagctgggcgcggtggctcacacctgtaaccccagcactctgggaggcagaggcaggcagattgcttgagcccagaagttcgagaccagcctgggcaacatgggaagcctccatctctacaaaaaatacaaaaagtggctgggtctggtggagtacacctgtggtcgcagctcctccagaggctgaggcaggaggatcacttgagtctaggaggcaaaggctgcagtaagccataattgcaccactgctctccagcctaggtgacagagtgagacccggtctcaaaaataaaaatcctggctgggcgctgtggctcacacctgtaatcccagcactttgggaagctgaggcgtgtggatcacctgaggtcaggagttcaagactagcctgaccaacatgatgaaaccccctctctactaaaaatacaaaaaaatagctgggtgtggtggtgagtgcctgtaatcccagctacttgagaagctgaggcaggagaattgcttgaacccgggaggcagaggttgcagtgtgccgagattgcaccactgcactccagcctgggcaaaaagagtgagactctatctcagaaaaataaatgaataaaaattttaaaaagataaaaactccagggcgctcctgtttgtccacacttaggtctctggaaatgaattgcatcaccaaggtctctgtgtgaaacaagataaacaaaaaagggtcatctgaaatgctgtgatttgtaactaaacaaagttctttttttttttttttccttcctgagacagtgtcttgcactgttgcccaggctggagtgcagtggtgcgatctcagctcactgcagcctccacctcagcctcctgagtcctgggactacagatgtatgccaccacacccagctaactgtttctttctttttttttttttttttttttgagacagagtctcactgtgtcacccaggctggagtgcagtggcacgatctctgctcactgcaacctccgccttccaggttcaagtgattcacctgcctcagcctccctagtagctaggattacaagcatatgccaccatgcccagctaatttttattttttagtagagacgaggtttcaccatgttggccaggctggtgtcgaactcctgagctcaggtgatctgtccacctcagccccccacagtgcctctgtttgtattttttgtagaaacggggtctcgccatgttggctgatctcaaactcctggtatcctcctgctgtacctggcagctaagttctttaacgagtaagatttgcattacaaagtttttccattgttggagaaggcctagccaagggtgctgaaagtacagaagccacaaaggctcccaccaggacacgggaagggctgggccccacctgcaaagtcagatctggagcaggggcagtgctggcatggaatacagtcctggagccgttccgcttgtgcccgcgctcctgtgcccatgggtccctctgcgaggtgccaggtcttggggagactgtcctgtgctgggatttgaagtctgctggtgccgttgtccatcttgcttttactttggcagctagttgttgggggccacttttacaaatgtacttcctttagcaggcatggtggtgcatgtctctggtcctagctactcagaaggctgaggtaggaagatagctggagcccaggaggtggaggctgcagtgaaccatgatcaaactactgcattccagcctgggcgacagagcgagagaccctgtctccataaaaaaaagtgtttcctggcagcacatgccaccacctggaatgcttctccaccagcttgattttctcccactacctcctctggtagggagctcactccagtgggtgggtggggctgtggccctgtcattgggagggctctgttcatgtgtgttggtcaatgaatgaccctccccaccacatccaacacaggatggggctgtcagaagtcaggggccgtgggggcacagagaggaaagagagagggcagggccccccatgcgaggctgggcagagagagggcctccaggaccgtggggagcataagtgtctggggaagccccgtccacacctgccaccctctgaaacattcagtcacacctgcagagtccctgctgccctgcaaggtggcctaggcacaggtcctggggtcaggaccctacgcccctggcagtccggatcgtctctgccctgcggcagccgcgtctacgtggtgagtcgcctgctggctgcatggggcttgtgaagccgccagtgctgggcgacctgcatggagccgacggtggtggctgatctaccccaaggagggcggagggctggcctccctctggtctcagatttgctggacttgaacaagttcctcgccgcttggctctgggactcttggagtctgagcaggggctccctcacccctgctctgaagctcagtgttcgggtcctgcctggtttttggtgtgccaaggggtacaagctactgtctgggcaatgctgcctgtgaagccgatgtttccagctgtcctccccaaccatggccacagctgacgtcctctgtggctgcacgcaccacctctgcacagcctggactgagcactgcacttccgacggagactcccccaggagcccctgcccccagggtggggttttcatgccacagtactgcctttgcaagtggtctctgctccgcggtttcctttctgtaagtgctggaggatctgtgtagatcccccttcatctgtgaatcggtcccggggggccccacacccacagctctcctggggctcaggatctgcatagattccctgttcatctgcagatcagtcccggggggccccacacccacagctctcgtggggctcaggatctgcgtagattccctgttcatctgcaaatcagtcccggggggccccacacccacacctttcctggggctcaggtctctatagaccctctggctccaggctcgggaaattgtcccccagaggctgtcttcactggggacagatgcttaggcctctcctcgtcctgggatggccagtgctggcccaggagtggtcgggtgtggtggggacacatgggcctttggggctgcgggaggcagctgtgccctgtggagaaccggtggggactgtgggtggggagaggccattctgggcgagggagaaggggatggggaggaggctggtgacatgacctggccccagtagggggcaggctggaaggagggagagctgctggccattgctctgtggccgcgtgggccaccctttgggcccatgtgctttgggctgagccatgtagagaaccctgggccttctatgtggtcgtgggcattgctgccctgcactctgccttcgtgtcctcatctgcacaggcggtgggcgctggcacccgtccatgaggccttgcagaggggacacgagataagccacgaaaacccactaccacaggactgtgggctgcatgctcttgtccctcagagcctgactggccccatgtggccgagccagggaccacatgcgtcccttgactgcgggcccagtcagcgctgcctgcgggctcttgcagaagaaacagccctgcggttgatcctatctccaaccccaggccgggagctcgtcagaggccacctggagctgtggaggtggcaatcaggccaaccgcctcagtatctcaggacagagtggtgctcgggatgacaggagcagcaccaaacccgcatgggtctgtccctacctggtgacgcaagccagtgcatgcctcaggtgtctgtttcctaaaaaggcaggtgtcgcctcggcccttctggtctccgtgagtcagcctcctccagggccctcccaggtcttttgtgtctggtgtctctcacagggtgcaacgtcctcagggcgtgtccgcgctgtggcctgggtagagccttgctcctttcatggctgggtcgtgttctggcgtgtggagggccgcgctggttcgtccctcacctgttgatgcgtatgtaggattttgccgtcttttggctgttgtgaattgtgcgtctgtgagcatttgtgtaccagttcctgtgcctttcccattctcctgggtgtgtatctaggaagtgctgggtcatgtggtgactgtgggtttctcttgcgtagacataactttatcatcacttaacattagtagcagaacgggactaagctttcatcactgacagactctgtgtttaacgattgaggaacttacctgccaaagaagtcaccagggactggggagagggatggggagtgagtgttccatggcgacagagtttcagtttgggaagatgagaaagttctagagatgaccgtggtggtggctacacaaccacgggaatgtgattaacaccactgaactgtacgctttttttttttttgagacagagtcccgctctgtcacccaggcaggagtgcagcggcacgatctcagctcactgcagccttcacctcccgggttcaagcgctcctcctgcctcagcctcctgagtagctgggattacaggcatgtgccatcacacccagctaatttttgtatttttagtagagacggggtttcaccacgttggccaggctggtctcaaattcctgacctcgtgatccacccgcctcggcctcccgaactgttgggattacaggcgtgagccaccgtgcctggccagaactgcacacttaaacgtgttcgagatggtaaactttaggtaaattttttcactttttttttttttttttcttgagacagagtcttgctctgtcacccaggctggagtgtagtggcatgatcatagcttactgcagcctcaaactcccagcctcaggcgatcctcccacctcagcctcccaagtagctgggaccacaggtgcgcgccaccacacttgagcccaggaggttgaggctgcagtgatccgtgattgtgccatggcactacagcctgggtgacacagggagacctgtctacaaaaagaaccgctgtatttacagaccggcagcctgtacatggccttgggctgtggtttgctggccctggtgggaagagcgtttttcctaggctaccttctgtctccatggcctgcacggaccttcactttattcttgtacaaacccccttcctgcctcgggctgtgcatctctctctggaacgttctttgcggtctcctcaccgccacttttcttcacacctcaacataaatgccacccccttggaggggccttcctggtttggctgagcctggtcccatgtgggctctgcatgggcccctggatgttaccttggttgtagctgagtgcggatgtggcttgtccacaggaggctgatgtccctggagctgtgacttggtctacctgggcctggacccacgtggccggcccggggcctgtgcgtggccagctcttgcacactgccttagagctggtgtggcttgttgaaccccgttgcagacgcacacgcacgtgggtccccatggctcctcgggacatggaggctgcccacgctcagggaagagtccttgtcgggacctccaggactcttcccagcccccgcctccctcctggggcctccagggcagaaagcccctttcccgggcaggaggacagggtgtggatatacaggctgggagggtctgtgggcagcagccgaggcccaggttgggggagcctcacctaggatgaggctagggctggcagaagatccccacagaggagccaggaggaccccacagtcactctagctcccagggcctggaggtgcaggcgagccccgtggtctccgggcagccggccctgccccactcacctctcctgcccttcccgctgcaggctaaccttgccgcgggccgagccctgcctcgccatggaccaggactatgagcggcgcctgcttcgccagatcgtcatccagaatgagaacacgatgccacgcgtgagtgcccccgccctgcccaccactgtggctccccctcccccagctgcctctgccctggccagcagcctcaggtgtccccactgtcactaaagccccacggaccactcaggtcccagtcccccaggtcacacggggcctccgcctcctgggctgtcagggttgccgccacccccagggccatagtcagagcccagcggggcttggatggatgaggaggcaaaaggcccagagtggtggagctggggcggccgcatgggcagaggcacagggtggcctgcagagcctttagggagacccgttcctgtctccaagccccaggcacatctggaaccctgtgggatttggggggccctggctttgtccttccttgcgctccaccctgcctccccagcccagccgtgtttgccttgccctgggctccaggcaggccactggccacacagggtctcggggctggtggctgctgtgtgacagccacatccctcacctgcttccccacccgactcctgcggggggctgaggggccaaactcctgttgctgtctacacaacatgaagcctgggtcggaatagcatcaggcttagcctggacggccaccagtccctgccctgtgatagacgcccaagccatcattctcgaagacgaagttgccattgtcccgagtccctcccccatgggctggcctgcatagacgggtctgaggggcatgggcctttggggaggggctgtcccatcgcagctccctcagtgccagcaacctctgtgcccaggcattgggctaggcctggggcaggctcaccttcaaggctttgttcagcttcagaccccaaagcctgggtcccgggacctgcgggagcccaccacagccgccttctccccctgtgcggtgcggcccccacagggcagagccagggaggcagatccaggatcgtgcgtgatgtagcagggtccccattggtaaagggacagggccactgcagaagaaaagtggcgtagaattagaggtgtctttgcaatctcagggatttcagagagagagaggcataaatacaggggcatctgtgtgcacagagaggatctgggcaccacggcgcccagcagcaggagcagccctagtgccgaccctcggtctccagagcactctcggggctgccaggaggacagtgggagcctgcaggcccagcagtgcgtgggagggcggggcgcagtgcgaggatccagcaccctccatccagtgcacttcgaagtctcccggatgcagccaggccggggtgtgaacgggagatgggggaggagcgggcattggcagttttgggagagctccccacatacccgtcctgccccgcagtcacccagcacagcctggactttatgacacagaaccaccttcagacccagacggagcgccaggctgtggagagacagccctggaaccctccaaagtgtcaaggccatgactgcgtcacaggctgggggcagggagatgtgacagcagacggaatatgaccctacgcaagcctgtgtttcctggggctccaccagagaggccgcagacggggcccacgcagcactcgcagaacctctcccagtcctgggggtccggagtcggaggtcacggtgtgggcagggccacgcttcctctcgaggctccaggggaggacccttcctgcctctcccagcttctgggggctcctgctatccgtggctgtgaccacgtccctctggcctctgcatctgtcctggaaccatctgcttgtgtctctgtgtccgtgttttcctcttcttatgaggatgcttgtcatcaaatcagggctcaccctaatggcttcctcttgagtataatcacatctgcaagaaactcgtgtccaatcagagtcccattcccaggttgcggggctcaggacttcacagtatccttttagggacaccggtcagctgataacagacccctcatagaaaaaagacggcgcggggacagtcagatggggttggagggttagacgggtgttgtgggcagcaggagatggggatgagggccacactcccaggtggctctgggtacagctgttgcgtgtcttgtgccgtcaaggcctgcgtctgtgatcatctagagacggtgaatgcatggcacctgcgcagcgttgggagggcagttggggtcttgtgctccctggctctgtcccctccgccatggcccccattcctgccactccaccccgtcccgtggccctgccctcaccaccctcctgcctggcagcgttgggaggctgagcctgcccgtgggcctggcatctcccggaggcttctggcacagaaatccctgaccatgagtgaccacgagtgactgtgtggctcccctccttgggttttcttttttttttttttttttttttttttttgagacggagtctcgctctgtcgcccaggctggagtgcagtggcacaatcttggctcactgcaagctccgcctcccaggttcatgccattctcctgcctcagcctcccgagtagctgggactacaggcgcctgccaccacgcccggctgattttttgtatttttagtagagacgaggtttcacagtgttagccaggatggtcttgatctcctgacctcgtgatccgcccgcctcggcctcccaaagtgctgggattacgggcgtgagccaccgcgcctggcccaccccttgggttttcaagatcaaagccccctttgctcagtggccagaggctgagagaggctggcctgggggcactctcggggggctctcggtgctgagagcaagccctctgctgatgcccttcaggtcacagagatgcggcggaccctgacgcctgccagctccccagtgtcctcgcccagcaagcacggagaccgcttcatcccctccagagccggagccaactggagcgtgaacttccacaggattaacgtgaggggctggctgggcaggagatgggaccccccgggaagcccagggcccctcccagcctccttgctctagggccgggaacaagcgggctcctcgacccctccctctctgctctcctgcctgcaggagaatgagaagtctcccagtcagaaccggaaagccaaggacgccacctcagacaacggcaaaggttagggtcccagcccatccgccctgcaggcccccaccctgccttgccccgcctcactgtgcttggtgcccgcagacggcctggcctactctgccctgctcaagaatgagctgctgggtgccggcatcgagaaggtgcaggacccgcagactgaggaccgcaggctgcagccctccacgcctgagaagaagggtctgttcacggtaagcctgcggcaccccccacccgggagctggctcccagtgcagcctccccggccccccacctcccaggcaccagctctgcctccccgagcccggttctcgggcccagccacggctcagcacccccgccctgaccctgttccttagccaggtcaggggccctgggatctgaggctggaggtctagcaggtaaactgggatgtgggggtgcgggaggaatccaggctcagcctgttgggctttttctccccacaccaatgctacctggggtcccgaacacccaagccggtgggggtcctgcccgtagggggcagtactgggtcctcccacagggccccactctgtccacatgatccgggagctcaaaggcaggatcacacggagcctggcttgggtccctcgagagagggcgggaggggtggggggtccgcagtccccgccaggaaggcgcctgcctttttacagctgctccacacagggtctcagcacctgccttagggctatgagctgtaccgggagcgtgggctgctggggggctctgagggtcctgcggcctgggcgtgcgctcagctggcatgtcccccgctccacagtattcccttagcaccaagcgctccagccccgatgacggcaacgatgtgtctccctactccctgtctcccgtcagcaacaagaggtgggtcccagcttcctccgcagccctccctactccctgtctcccgtcagcagcaagaggtgggtcccagcttcctccgcagccctgtccctgcgggtcctggtgggcgaggctgaagggggcttcccagggcatagtggcctggagctgtgactgtgtcctcccccagagtccttagagtggaggggccccagccccccatgaggccatggtcagtaatagaagtgtagtccaggcctagagcagcccagagatccccttgctgagggcacaccatggcctggcagtgttggcctcagacaaggggcagggtagtcaggaagggctgcctggaggaggtgtggggagcagagccagcacagctgtggaagggaggccagggcagccagacacccgagggtgaaggcctgtggggctgtccctgggtttaggatcacatggtggcggtggtgattggaggggccggactgggctcctggggctggcagggaaggagacacttcccaagcgtttgcaagaggtgacccaagtgccgtggctcacggatgccacgtggccgcctctgcagccagaagctgctccggtccccccggaaacccacccgcaagatctccaagatccccttcaaggtgctggacgcgcccgagctgcaggacgacttctacctcaatctggtggactggtcgtccctcaatgtgctcagcgtggggctaggcacctgcgtgtacctgtggagtgcctgtaccagccaggtgggtgctgcgtggggtgtgcatgtgcatgggggcctccccagctcccagcagacctcaatgtacccaccgggatccagggagcatcagtacgagccaggcgcctgccatggccctcctagctggggcctcccagcctcccagccacagccctcccagccactaccctcccagccctcccagccatggccctcccagtcagggcctcccagccacggccctcccaaccctcccagccatggccctcccagccactgccctcccagccagcagtggcatctgcggcagcatggggtccccactggagccacaatctctgttcagctctatagagaagaagagacaggtgtcccagcctggctgagcccaggggccactatgaccaccgagtggccgctgtcctggagtggcctctgggcgcatggagcctgctagtccctacagggagactgggttgctggtgcagggcagcagcagacactgcccgctggggtgggggtttcagggataacgccatgcgagtagtttcgggagagcgagggttggcgccctccctgcagcctatgagctgctcccgctggcagtgtcccacacccttctaggccctgccctcaccatttgagcgtcctctcccggcagcaggagccgtgtagctctgggcagcttcctcccatcctctgctcgtcccatgcaggctctcccctgtgtgtgtgtgtctcccctgtatgtgtgtggcaggcttgagcttgccaggtcccagcagtgaccaacccagcgaccccatgggcctggagtgatgagagagtgaatgagtggatgggagagtggatgggagagtggatgggagaatggatgagagagtggatgggtgagcggatgagagagtggatgggtgagcagattagggagtggatgggtgagtggatgggagagtgggtgggtgtgtggatgggtgcgtggatgggtgcgtggatgggagagtggatgggtacgtggatgggtgagtggatgggagaatggatgagagagtggatgggtgagtggatgagagagtggatgggaaagtggatgagagtggttgaggggagtggatgtttgagtggatgggagagtgtatgggagtggatgggagagcggatgggtgagtggatgggagagcagatggttgagcggatggatgagcagatgggagagtggatgagagtagttgaggaagtggatgggtgagaggatgggagtgcggatgcttgagcggatgggagagcggatgggagagcagacggttgagcggatgggagagcggatgggagagcggatgggagagcggatgggagagcggatgggagagcggttgggagagcggttgggagagcggatgggagagcggatgagagagtggatggttgagcggatgggagagcggatgagagtggttgagggagtggatgggagagtggatgagagtggttgaggaagtggatggttgagtggatgggagagcggatgggagagtggatgagagtggttgagggagtggatgggagagcggatgggagagcagatgggagagcagatgggtgagcggatgggagagcagatgggagagtggatgagagtggttgagggagtggctggttgagtggatgggagagcagatgggagagcagatgggagagcagatgggtgagcggatgggagagcagatgggagagtggatgagagtggttgagggagtggctggttgagtggatgggagagcggatgggtgagtggatgagagtggttgagggagtggatggttgagcagatgggagagcggatgggtgagcagatgggagagcggatgggtgagtggatgagagtggttgagggagtggatggttgagcggatgggagagcggatgggagagtggatgggagagtggatgggtgagcgcatgggagcgcatgggtgagcggatgcgagagtggatgagagtggttgagggagtggatggttgagtggatgggtgagcggatgggtgagcgggtgggtgagcgggtgggtgagcgggtgggtgagcgggtgggagagcggatgggagagtggttgagggagcggatgggtgagcggatgggagagcgcatgggtgagcagatgcaagagtggatgagagtggttgagggagtggatggttgagtggatgggagagcagatgggtgagtggatgggagagtggatgggtgagcggatgggagagcagatgggtgagcggatgggagagcggatgggagagtggatgagagtggttgagggagcggatgggtgagcggatgggagagcgcatgggtgagcagatgcaagagtggatgagagtggttgagggagtggatggttgagcggatgggagagcagatgggagagtggatgggtgagcggatgggagagcagatgggtgagcggatgggagagcggatgggagagcggatgggagagcgcaggggagagcggaggagagagcggaggagagtggttgagggagtggatggttgagcagaagggagagcggatgggagagcggatgggtgagcagatgggtgagcggatgggagagcgcatgggagagcgcatgggagagcggatgggagagcgcatgggagagcgcatggatgagcgcatgggagagcgcatgggtgagcggatgcaagagtggatgagagtggttgagggagtggatggttgagtagatgggagagcagatgggagagtggatgagagtggatgggaaagcggatgagagtggttgagggagtggatgggagagcagatgggtgagtggatggaaaagtggatgggactgtggatgggagagtggatgagattggatgggagagtggatgagagtggatgggtgagacagtggagggatgaatgtacccatggatagactggggcttcgagaccagcggcaaagctcacactgacctctgcctccaggtgacgcggctctgtgacctctcagtggaaggggactcagtgacctccgtgggctggtctgagcgggtgagtgcagagggcttggcccccacctgggagatctgatggggctcttgacagtgttgggggccttgaagacccagagggtctagtgcgtggcctgaggtcgcctgtgtccaagcataggtctgtgtcccccactgtccccggccttagtgtggtcctggtagagggagtaacagggatgagcaggcacccaccaggcccctagaaaggatggcaggtccagtggggaaataacgccccagttccttccatgggacctgcccacctgggactcgctcccctggagttccattttccactcagggtcgagtgggctttagttccattttagattatgatgaaaacatctcagcagcagctttgaagcatatcatggggagggtctgtgcccctcacccagagctgcccagggctgcccctagcactcgtaaccgctcactgtgtccaggcgtgtgcgctcaccctccctccatccatcttaggttttcatgtgcctcaaagtcagttgcagacagcaacgcatgttgcccagctcctgggcctgtgtggaacctggagctcagtgtctgcagtttctccttccctctgtgtgaaatgtccatgtgggaaggtccacgtaccgagtcttggctggactctgagaaacccaggcgcagtgtgtgcggggtgtgcccgccaccccagcatgcactgaggggggtttatgcttcttccgaagggacgtgcattcgagagtcgttagggaaaccgtcccagagccctggtgaggagagagcctggcgcgaccaacgccaggacgggcacagtccccgggccagacctgacaccggtgctctgcccatgccttccatcctaggggaacctggtggcggtgggcacacacaagggcttcgtgcagatctgggacgcagccgcagggaagaagctgtccatgttggagggccacacggcacgcgtcggtgaggagcccgggtcccatggctggtgagctccctgaggccccagctccgcgagggcaggagaggctcacccccgcttccacctggcctccaggggcgctggcctggaatgctgagcagctgtcgtccgggagccgcgaccgcatgatcctgcagagggacatccgcaccccgccactgcagtcggagcggcggctgcagggccaccggcaggaggtgtgcgggctcaagtggtccacagaccaccagctcctcgcctcggggggcaacgacaacaaggtacccccgcccagagcctgggcttccccttcaccagaagccgcacccctcacactggcaggaacggaagagcctgggctggggcgggcgcgggcgcggggcccactccacagccatcagcagggcaccaggcttgtccttcctgctcagccagtcctgccctgtggcacagggtgacgagtgtgtgcccccaggggtccttgagggagcagcaggaggagtgtggggtggggtgccagggcaggtcgtcacacctgtgaggaccggcctatgggaccacagggctgggacagccccggcctcacagcccctgtcccccagctgctggtctggaatcactcgagcctgagccccgtgcagcagtacacggagcacctggcggccgtgaaggccatcgcctggtccccacatcagcacgggctgctggcctcggggggcggcacagctgaccgctgtatccgcttctggaacacgctgacaggacaaccactgcagtgtatcgacacgggctcccaagtgtgcaatctggcctggtccaagcacgccaacgagctggtgagcacgggcggcccggcctcccaccaggcctcaggatgtgcgtcctgctggccccttacctgccacctgagagcagcctgtggggagatgggtcagagtcgctctgaagggagatgggcgagggaggccgagcggggaggcagggagttgtggggggcaaggcccctgggcctcatcagggcctcacctggggcaagacttggggcctctgggcccccatcgcagccacacctggcggctctgtgaggagccggggagctcctatggctgcctctgcttagaggggaggcccaggatgaagcgggctccactgagcaccctggcctgctccagccactccgggcgtgtcaccaggacagtctcgggggtgacttgcaggtggggcagaggggctgtgggccccgtttgggtccttgttgggctccagcctttggcggtgggtggaggggtccacctgtggcctccacacctcctagacagactcaggtggcagagccacatcccagcatcccctgctcctcctgggctggctggcggctctgagctctcacatgggctcaggcgggtgcatgtgaggcagcaggcatagcacccggcctcgttgcccctcaccgaccgcagcgccccctccgccctccaggtgagcacgcacggctactcacagaaccagatccttgtctggaagtacccctccctgacccaggtggccaagctgaccgggcactcctaccgcgtgctgtacctggtgagttcacgccaggcacttcaaggtgccccgggattctggacaaactgccatggccaccccagagcaccctgtcctgtgttcttagggaggatggtgtgcagatctaaaaccccgtgggacccagcagcaggggccggcagggcatctggtgctggttgtgttgccagcgttggaatgggctctaccgaactccccagccctgcaggtgcaggccctgtcctcctggaggaccttagcttcttcatttgtttattttccccataaagaggggtgaagaggaaagccaaaaccaactcacagctgaccactcagatgaccctgtgaacgtcctacacagtaactgtatgcacgtggctggatgggggccaggaggcgtccttggccccacgtgccctcacttgccaagattttgtttcttccctgaaaaacatgttctgtgctttcatccgcgcatctgacagtccctcatctgtgcagagttgatgagcccctcttgcaagggggcgtcctttgtgtttttgcaaaaatgctccaaccttggctaggtgcggtggctcacgcctgtaatccctgcacttcaggaagccagggtgggaggatcgcttgagcccaggagttcaagaccagcctgggcaacatagcaagaccccatctctacaaaactttttttaaatgaggtgtggtggtgtgcacctgtagtcccagctactcaggaggctgagatgggaggatcacctgagcccaggaggtcaaggctgcagtaagccaggattgccccactgcacactccagcctgggtgacagagccagaccccgtcttaaaattaaaaaaaaaaaaaaaaaaaaggctccaaccttggtttctgcttgtggtggccccagcctgcccctccctcctggctccagagtctggggggcccagccacccgacaccttgctcccctctccttcagtcccccagcactgtcccgaggcacctagaggcccagagacatggggtgcttccctcctgtccacaggcaatgtcccctgatggggaggccatcgtcactggtgctggagacgagaccctgaggttctggaacgtctttagcaaaacccgttcgacaaaggtaaagtgggtcggtatcagcgccactcgcccccgccccagcctgtcccagggtcgtccctgtccccactgtcctcgggcgtaccctcctctgggttcccccacttccgagcttccctcacctcaaattctgggtcatgtgtcggggcagtgtggcaggccgaggctgaactggcacctcccagcccctcaggaccaagccccaaagccttggggaccctccaggcagcttcctccctgggcctgcggctcagcgcatctgccatccccatgtgtctgcaggagtctgtgtctgtgctcaacctcttcaccaggatccggtaaacctgccgggcaggaccgtgccacaccagctgtccagagtcggaggaccccagctcctcagcttgcatggactctgccttcccagcgcttgtcccccgaggaaggcggctgggcgggcggggagctgggcctggaggatcctggagtctcattaaatgcctgattgtgaaccatgtccaccagtatctggggtgggcacgtggtcggggaccctcagcagcaggggctctgtctcccttcccaaagggcgagaaccacattggacggtcccggctcagaccgtctgtactcagagcgacggatgccccctgggaccctcactgcctccgtctgttcatcacctgcccaccggagccgcatgctcttcctggaactgcccacgtctgcacagaacagaccaccagacgccagggctgattggtgggggcctgagaccccggttgcccattcatggctgcaccccaccatgtcaaacccaagaccagccccaaggccagaccaaggcatgtaggcctgggcaggtggctcggggccactggcggagccagcctgtggatccaagagacagtccccacctgggcttcacggcatccttgcagccacctctgctgtcactgctcgaagcagcagtctctctggaagcatctgtgtcatggccatcgcccggcggtcagtgggcttcagatgggcctgtgcatcctggccaagcgtcaccctcacactggaggaggatgtctgctctggacttatcaccccaggagaactgaacccggacctgctcactgccctggctggagaggagcacaacagatgccacgtcttcgtgcattcgccaacacgtgccctcacagggccagcgtcctccttccctgcgcaagacttgcgtcccccatgcctgctgggtggctgggtcctgtggaggccagcagcggtgtggcccccgcccccaggctgcctgtgtcttcacctgtcctgtccaccagcgccaacagccgtggggaagccaaggagacccaaggggtccaggaggtgggcgccctccatccttcgagaagcttcccaggctcctctgcttctctgtctcatgctcccaggctgcacagcaggcagggagggaggcaaggcaggggagtggggcctgagctgagcactgccccctcacccccccaccaccccttcccatttcatcggtggggacgtggagagggtggggcgggctggggttggagggtcccacccaccaccctgctgtgcttgggaacccccactccccactccccacatcccaacatcctggtgtctgtccccagtggggttggcgtgcatgtgtacatatgtatttgtgacttttctttggatttgttttgtgtttttgttgactagtcctggaaatgtttgaggctagacggggaggggccaggacccacccactgctcctgggggatgaggtcctggttttaaagccccgtcatttcaagcgggtcgatcttccacattcactggagagactctccccacctctgtctgggtggggcgcggacccctcactgtgcgcctgtgcagggggtgctggtgcacgtggcagtgtggatttccagtggtcacggtcttactgtttcaaggtttttaaataagaaaaccaaccctgccttcgcccatgcccgcccctgcccgcagttgccaaagagccgccttgtcgctgtgggcgtcagggcttggctggctcagtgcacaacccacagtggccttcagaggctcctcctgggactgggaaccgccgcagggccaggcggacggcgtgaggtttgtgttggggctggttctgcccatgctagggggtgggggagctcccaggacagaccagccttgtttctcatgtaatgcagtgacgctgtcattaaacacgtggattcatgtgtggccgggactggctggctctaggtccccggctcgggtggggtcacacggtcctgccctagagtccccatctggccctggagctgcagaagcagcttctgaggggcttcccaggcctgcatttcacagatggggagctcagccctcgaaggccgcagagacgcctcccaggcccgtctgccagggcgccggccacaatcctgcagggccaaggactggactccaggcaagtccctgcgctccagctggacggccctgttccagggaggaggtgctcggttgacaccatcagggagggagggtgggcactgctgggctgagttcacccccagggctggccagatggggccaggagggacagagcaaggggggtgaaggccgtggtgggagggtcccatgatgatgggccagggctcgtgtagaaatgggggaattggttccccatggcccaggacagctgagaggaggtggaggggccccaggggagtgtacgtcaggctttgcggggcacgggggccactcagcagcgctggggcaggtgcctctgctgtcagctccacccgacaggcagacgaaggccagtggggccatcgcttcctggggcgaccctggcagtggttgggagacgcccagatggagggggaggctgaccaagggccccgcagggcgggctgcaacttttctgttgatcctggaatgtagctggtgcagtgagagggaaagagaattgaaaaactcaggctgccataggttctgcgatgagaggtgcaggaggcaggagcctggcccagggggtgctggtgcctccccggggtctgggcggagagaacaggaggaatggctgggaagtggctgagggagccaggaggccggggggccgggggctgcaggggaggctgtgggggtcctggcagccaggaggccccaggtggttttgaggctcgctcttgcgcggtgcctgagaagagggtgaaggagctggggcaggccccatcctgggcattggagatgatgaaaccgagcagacctggcccatgtggagctggcatgggggacacagcccagagacagagaagcttatgaggaagtgaggaggtggcgtcacaagggtggggagggggccttggggaagggcggccttggatcagaggctcaccacaagcctggcatttcagccagggctggagaaggcagggacgcctgggtgagaggcaaagggcacagccatgcaaaggccctggggcaggacggcacctggtatgcgggaggaacagagtgaggagaggagggcagggcgtgcagggccttgtgggcctcagggaggacttgggcacctacgccgagggagtggagctcctgggtgcgtgtccagatgggaaaggcagggtcgtatctgtggggacctgacaagggcaggggaagcggagaccagggtgcaggctccgcccccacccaaggccgggcccagccagaggaggggcagggcagggcaggaggtttctggatgtttgttgggtttggtttggttttgttttgttttgtttattgtggtaaaatacaaaatctaccgtcttacagtgaggtggcgttcagtaccttcaccacgccgtgcagccatcccatctgattccagaacattctcatcacccagaaggcagccctgtccccattatgtcacctagtcacccccaggtccccctccccagtcccggcacccacgaatcctctccctgattctgtggattggtctgtcctggacatttcatagaagtgggatcacagcgtacccttctgtgtctggtgtctctcactgagcgtgacatcctcaaggtgcatccgcactgtggcctgggtcagagcttcgcacctccttgtggctgagtctcgttccagcacggtggcggcgccgtgctgatcccctcaccttcactgggtgttcggtgttctccgcctcgggctgtcacaaatcgtgctgctgtgagccactgcgtgcaggtctcatcctgggtgtattttacaaacggactggatgtgagtgggtgaggagtgaggagctggggtgacaggtgcctgcgaccccggccaggcactgcctcctgcgatcgaaggggcagggggagacagaagcccctcaagggggtgtggagatggagaagccagaccccaggtggggggtgcatagagctgggggctcagggccacggaccccacctggcagtggccctggccttgcccacccacactgtgtcacccccagttgttaaatactcagaacgactctccagcccttccctcgaggccacctcaccccgcagctgggaggagggagtggtcagcgtggttgccgagacactgggtggcctttatgctgtcaacggtggcctcagaggccttctggcaggagcccgggggatccaggcagacatgcaaaccctcaggcaagaggctgcacggccctgtatcccctcggggaccctcgaggccagcttcccagcaccgctgtacaggtgagcccctccctacaggtgagcccctcccagcccctccctccctccctccctgggtgtcaggttacatggtgtttggtttggggtcttgcacgtgtcactcgttattcctaaaaggctcatgtgtgtgacgtcccctccagctcttcctgttcccctccggccagtggccgctcactgtgggggctacagacctggagacaggccaagaacaaatgtgtctgcggccgtctccaaggactgcaaacgcactgggagcttcggccacagaaatgttcgccctctgaaatccaggcctgtgcggggctgggcccttctgtggctgagagagtctgtcccacacctcttgcagcccgtggtggctctgggcaaccccaggcactccttggcccccggtctctgcttctgtcttcacccggccttcctgtctgcgtccaagtttccctctccttataagggtgccaggcactggattcggggccatcctaacacggggtgacctcatcttagctgcatctgctaaaaccatttccaaacaaggccatgtcctgaggctctgggcagatgtgattttgggggtataccagtcaccccgatacagtgtctattatcaattgtttaaacaattatggaatactatgcagccatgaaaaagaagagtgaaagccctttgctccatttccaaggaaagaaattaaaccaagatggtggctgggcatggtggcccacacctgtaatcccagcactttggaaggctaagacaggaggatcacttgagcccaggagttcaagaccagcctgagcaacatagtgagacccatctcttttcttttttttttttttttttttttttgagacagtctcatactgttgcccaggctagggtgcagtggcgcaatcttggctcactgcaacttctgcctcccaggttctaggattcttccatctcaagccttctgagtagctaggactacaggtttgtgccacatgcccagctaatttttgtttttttttttggacggagtctcactcttgtcgcaagactggaacgcaatggtgcaatcttggctcactgcaacctccaactccctggttcgagcgattctcctgcctcagcctcccaagtagctgggattacaggcatgcgctaccatgcccagctaatttttgtatttttagtagagacggggtttcaccatgttggccaggatggtctcgatctcctgacctcatgatctgccctccttggcctcccaaagtgctgggattacaggcgtgaggcaccgcgcctagctgtgagaccccatctctataaaaaatttaaaaatcagccaggcagccaggcgcagtggctcacgcctgtaattccagcactttcggaggccgaggcaggcggatcacctgaagtcaggagttcgagaccagcctgaccaacatggtgaaaccccgtctctactaaaaatacaaaattagccgggaatggtggctcatgcctgtaatcccagctacttgggaggctgaggcaggagaatcacttgaacctcggaggcagaggttgcagtgagccgagatcgtgccactggacttcagcccagagcgaaactccatctcaaaaaaaaaaaaaaaaaatccaggcgcagtggctcacgcctgtaatccccacattttgggaggccgaggcgggtggatcacgaggtcaggagatcaagaccaacctggccaaggtagtgaaaccccatctgtactaaaagtacaaaaattagctggttgtggtggcgggcgcctgcaatcccagctactcgggaggctgaggcaggagaatcgcttgaacctgggaggcagaggttgcagtgagccgagatcaggccactgcactccagcctgggtgacagagcaagactctgtctcaaaaaaaaaaaaaaaaaatcaaccaggcatggcggcacgtgcctgtaatgccagctacttgggaggctgaggtaggaggatcgcttgagcctaggaggtcaaggctgcagtgagccgaaatcgtgccactgcattccagcctaggtgacaaagcaagactgtctcaaaaaaaaaaagagggtctcgctcggttgcccaggctggagtgcagtggaatgatctcagctcactgcaacctctgcctcctgggttctagcgattctcctgcctcagcctcctgagtagctgggattacaggcacccaccaccacgcccggctaatttttgtatttttagtagagacagtgtttcaccatgttggccaggctggtctcaaactcctgacctcatgatccgcctgcctcggcctcccacagtgctgggattacaggcatgagccaccgcacccagtgcaagaccctatttctattttttaaaaaaatggagatgcagtgaatgggctcccgcaagtgtgtaataacgggggtgagtgcatgtaccacctgctcctgggaggaaacaccagaaagtagtgagtggcaggtgggtacggggccgacagcaggggtgaggggctcatttctcattgaatattattctgtgctgttttgtttgtgttgagacagagtctcgctctctcacccaggctggagtgcagtgacgcaatctcggctcactgcaacctccgcctcccgggttcaagctaattctcctgcctcagcttcccgagtagctgggaccacaggtgtccatcaccacacctgactaatttttgtatttttagtagagacggggtttcaccatgttggtcaggctggtctcgaactcctgacctcaggtgatctacccaccttggcctcccaaagtgctgggattacaggcatgagccactgcgcccagacaattttgtgctgttttaattgtgttttaaaagctacatgtgtcttgcaattcatttcaaaagggtgaggttctcctgatcttgaaattgcctttctagtggaaaagccgagtctatgtggggtccctcaaacaggctctgtaactgaccaggctactcccatgttctgtgggcacctgggagtctagtcaggatttaagcagagttcctgccatgagagctggaaccgggctttccgtgcagggcagatgagattgttttgaaccctgctagactgtcttggggccagcaaccttgttttctgggatgacttccttgggacatattcccaagagcaaggtcaaagcataaaacatctttgagtctcttgtctttttgtttttgagacagagtctcactctgttgcccaggctggagtgcaagggcacgatctcagcttactgcaaactccacttcctgggttcaagcgattctcctgcctcagcctcctgagtagctgggattacaggtgccccccgcccccacaccatgcctggcttaattttcgtatttttagtagagatggggttttaccatgctggccaggctggtctcgaactcctgacctcaagtgatccacctgcctcagcctcccaaagtgctgggtttacaagcgtgagccacacacctggcctagtgggtcccccagtcttccctgggccatggcttagtgccagccccagaccacttcttcctggtgcacctccaggccaggggggcttcccagaggaagggacttgtgggtcttggaggctggacaaggactgtaggaatccaggagtagccagggcccttgtcctctcccctccctcttctccaggcaagaaaagctgagaacagaaaggtttagtgctgacttgggtgcttggggtgcgatgtgtggggagagggggagtcagcctctctcctcaagcacccactctggggtgaggggtacagggctgaaggacagactccaagtggcgagggagggagaccccacgccgtgggccaggcctctacatcatccaccctggcagacatcgcaaaggggtcaaagcactcgctgtagacatgggctcagtctctgccccctgcccaccctcagcgatgactacctgtccctggagggttcccgctggccaccagccatcaggcaggccacacgctggaagtacacgcccatgggacgggacgcagccggccagctgtggtacacaggcctgaccaactcggacgcctgggaagcctggtacaacctgccacgggccccggccagccccttccgcgaggcctacaaccgctggcacagctgctaccaacaccgtgagtgcagcatgccatcgggtgagtgcccccccccccgccctgggcagcgggcctgccagagggggacaggaatgaccgccagcccccgccccaccgcagcctacacccagcacctgcgggagaccgcctggcatgaccccatcgtccctgcccagtaccaggcccccagcacccggtgggggagcgcgctgtggaaagacaggccaatccggggcaaggaatacggtgaggctaggtgcagggtgggtccttgggaggccagggggacaaggccacctaggccagggtgaaactgcccggggcgatccaggagccccttgctggccaacggcgaggaggtgggggcacatggtgacccgagtcccacctacagtgctcaacaggaaccggtacggggtggagccactgtggagggcatcagactacgtgccctccctgtcggcaccccagcgcccgcccggcaccacccagaactaccgggagtgggtcctggaaccatactgcccctccacctgccagcggtccccgccttccctcacacccactccccgataaaggcatgctaccaggatgcacccactgtctctgcacccagatgagggggcactaacctagtcccaggggaccagaggctcgggacagaggcagacactgggctcgctggccgcccacaaccagggcagggctgagatgcccaggctacccctgcccagagcccccccgcaggcagacaggagccaggctgccgtcatctctttatttgctgccagcagagtccaccaagcctgccgggcagccctgctgcccaccacggtggggtccaggcccagcccaccaccccgtggctgtctcctccaggctccagccgtcctgagggggccctggcagtgtctggagacccccaggctggaggtgaggggtgaactggactgagctcagggttagggttcccccagacccttctgggattcctacttcctgttccctgccgagaggggcaccccaaatcctccagagggctgggatggattagagttgagaatgggacaccctcaaaacccagggggtccttgcaagtccctggcgggcatccctgctgccctcacccgaccccacccccgggagctgggtgaggatggagggtgggggtccagagaagagtgaggggcagtgggggcttttccccaaggccctggggggcatcctcgtgcgtccccacagttcccttgcacaggtgcaggaggctgtcaggagtcagggccgggcatcacggtcccctgcaagggaggggtggaaatggcattagagagtgtgggtcagtgtctggggagggaggggtgggccaggactcacagcgtcgcaggcgggtcggccacagcaggaggctacagagacacagggcagcggccacgcccacgccgcccgtcacagccaccatcgcccagtggtaaaagctcacgcaggccctgcagcagagctctgagctgtgggaggaggcgggggatgagtaggcaccgcgggtaccacccccccgccacccaagctgaacctgtgcctcccctcacccccgacagcggctccgtcctgtccaatccaggagctgggggccctgccactccctccctcctgtcccacacccaacagctcggccagtcctgtgggccctgcttccagcatccatgccaaatccaccatgtctccccttccctgtctcctcatggtccagccccagcatggcccgcctgcacccgccccggtcccaggctgcaacttctcccccagcagctgtcctcccggcagcaaccaccagagggcgtctgtgagcgcctgggtcagggcctgtccctcttctgcccacagctctctgtgagtcccactgtcctcagggtcaaatcccctaagtcctccccatggcccaccaggccctgcacgacctgccctcccctcctccctctactccagccacacaggcctcctccctgttcttccaacacaacatgccaggtgtggtcctgccccagggctttggcactacttgtccctccccattggcctggaatgctctgacatcctgcaggtgtcagggccacgtcacctcctccaagaagccctccctggcttcctgccctggctgtccaggtttctctgagcgttcacctttacacaccacccacgccggtaccaaccacatgttcacctctgtgactattaacacggctggctctgccccaggcccagaccggctgtggtttccaggccctgggcctctacaggcgtgaatgctgtgatgctgtggtctagaaccatccatgtctgaaccctgagttctgtgggtctgggttacacggactcggggctcccttccagctgggcccacccccgatatatttctgtacggtgtcttcagcactgcacacatggacccaacgtttgttgagtgaataaacgaagtgctcagtggaagaaaggaaaggtctcccctgcctatgactcccattggggcaggtgtctttggtccacagctggatgcccagacccagaacactgctggacacacagcaggcgcttaatcccctcttactgaacaaaagaatgaatgaacgaacagcggcactcacgggcaagggtgcaggctctggatggccatgactgccagcccattggccaccttatccaagaagctcatggagccgtacacgaacgctccgctgttctgtggagacacaggcgaggtggtcagcgtgcaccccgagatctaggacccggcctcccccaccccagcctggctaccagccctaccgtgtggggaccgatgaggtcggccgtcatggccagcgaggtgacgaggatggtggcacagccagcacccagcagcacagccgctgcgtacacggccacacccagtccctccgccagcgccacccaggcggcaaaggccaggatcaccaggaggcctgagaagtaggtcatctgcagggacagccccggggtcaggcccacaccactgggtgcccccaagcctggcgcttcaatccgccacccctacccccaaccccagcaaacaaggcatgagctggatggtccctaaggagccctggctctggccctggacacaacaccgaggctctgcagatcctccatgccagagctgtgctctctgtccacgccgtagcggctggagacgtgtggctattctgcctgagcgcaggtcagttacaacgaaagcaaacgacggactcggctcagtccccacggccacatttcaagccctcagtagctgcacagggtggacagaaagcgccagagctccatggctgcgagtgtataaactcgagacacagagaagccaggatcctagaattccttgttcccagatctggggctttttttttctggagacaagagtctcgctgtgtcgcccaggctggagtgcagtggtgtgatctcatctcactgcaagctccgcctcccgggttcacgccattctcctgcctcagcctcccgaatagctgggactacaggcacccgccaccaacgcccggctaattttgtttttgtatctttagtagagacggggtttcaccgtgttagccaggatggtctcgatctcctgacctcgtgatccgcccgcctcggcctcccaaagtgctgggattacaggcgtgagccaccgtgcccggcctagatctggggcttctacaaggcgggaactcggaggcctgagagcatccgaggatggaacccggagcgggtgggatctcggctgcagggcaccccatcctccgccccagctgtccccggtccccgcccactcacgttcctcccaatgcacttgttgatgggcttcatgaggaaggaggacaagaagccgctgaggtacatcaccaggggaatggtcgcgatgaacttctgcggaggcagagccaggcatgccgtgtcagtcatggctcgccaggctggggccgtcccatcccagcgtccccgccccaatctgctcaccttgggcaggtggagcgagtaggtgaggtacatggccatgtaggtctgggacaggttcacgatgagcctggtggtcatgtacagtatgcccacctgtgggcagaccgacagagggactggcaggggtcaggagggccttctccactcccaccagcagggggcaccggggccagggtgggcgccctgcagctggcatttgatccattggtagtgactgcccagtggggtgggccaggaagaggagagcagcacttgatgagtgacgtttgccctgggtgtgggctgcaccaggggccacgtgtgctctgcgtctggacgcagctgccccacagagcaaaggccctgtgggtgggagagaaggcccacgccagccccaccgtccccagcacgcacctggtagaaagccggctcccggagccagtgcttccagagcagcaggggctgggccgtggcaggggccaacaggggggtgtgctcgcctggctcctccgcatgcggccggcgcctctcccgggtgcccaggtggaatagcagtgagaacacggcgccgacacccaccaccagcagggacaggttctggggatgcagcagaagcagtcagtggtggcgggcccagcccccgcccctggctcgaggacttcaggcgacccacccggactccagctcacccggaacacgggcacgtcctggccccccagctggtcgctgatgctgatgtcttgggtgggctccacccgcgacgagccctgcaggtgcagcaggagccaggcggcgccgtagacggtgatgttggccaccacggtgaacgcatacctggcgggcaggcgggcagggactcaacaagacgccaggaacctgggtcacttcctccccacgtggctacgccgtcagagaggcctggggaacccctgactgacaggtgattccaaccactgccacactgggtggcctccaggaagcccgtgctggcctcagtttccccagcccgcacattacctaacgcgggaaagctgtgacctgcagctccacccttcgtgcccaggaccagggtacagtgactcggccaagcggagtccaggctacaacccaaaagtctgagaacccagagactcagaagccagaattcgagaattcttcttccccagatgctgggcggctaaagggcgagggctccctggtctagaaccatccaggccagcccctgcccacagcccggccaggcacagagtcccccggggggcctcagaatcctaccatgaatcagtctctctttctgaaagcgggaaccatgccacctccagaggccacgtgagcacagcaggaggtcagctggcaaagcaatggcacgtaggaagtgcctggggtctggccccggtcagatggggccctcaggggccctgggcattgggcaacctgtgtcgttagcgcctgcacctctgtcacatggccataatggggaactcaaatctgggggtggggaggagctggtgatacacaggcagatgtggagacagcggactcccccgacacgaaggcgctgtgaggaccctggctttgggcaccagctggggccgagtcctcctctgaaatacgcgggagagaagagttcccacctcccagctcacggggaggattaaagaagctgagattcatgttaagggcctataactatgccaggcacacggcaggtgctcaatgcatcatcctcgtaaccagaagaacctcttccagcgcctctagcaagttagtggataagccgggcacccgctgtacccaggtgtaatagaaagaattctaaggcagccccagagaggcctgcccatcccatcccctccccgtggcagcagcagctgtaagtccaccatggatgttactcccaggatgtagccagggctaagtggcattctatagcagagggaaagggacttcgcagtgtgttataaccaaggaccttggtcagctcgggtgtgtccacagggagattactggccaggcgcggtggctcacgcctgtaatctcagcactttgggaggctgaggcaggcagatcactgaggtcaggagttcgagaccagcctggccaagacggtgaaatcccatctctactaaaaatacaaaaattagccgggggtggtggcgggtgcctgtagtcccagctactcgggaggctgaggcaggagaaccgcttgaacccaggaggcagaggttgcagtgagccgagatggcgccactgcactccagcctgggtgacagagtgagactcttgtctcaaaaaaaaaaaaaaaaaaagccaggcacagtggctcacgcctgtaatcccagcactttgggaggccaaggcgggcagatcacctgaggtcaggcgttcaagaccagcctggccaacatggtacatggtgaaaccccgtgtctactaaaaatacaaaaaaaaaattagccgagatcgtgccactgcactccagcctggctgacagagcgagatcctgtcaagggagactacggtgtgtgagcctggccaagtcaggcaatcctttgggagagagggcttagggcttcctgggatcagagattctccctgctggcctcagaagcagcagccaccgtgatctccacaggtgcaagactacaacttctgccaccaaccacgtgagcatagaggagggaccgcccccagccttccataagacgctagccctgggcaaccccttgaatgcaggctcaagacagaccctgaagcccaacagccctctccccctagctcagccatgctggactcctgacccccagaaactgtgagaggagaaatgtgtgatggctgagtgtggtggctcatgcctgtaatcgcagcactttgggaggccaaggcaggaggatcgcttgagcccaagagttccagaccagcctgggcaatatagtgagaccctgtctctacaaaaactttttgttttttttttttgagacggaatctcgctctgtcgcccaggctggagtgcagtggcgctatcttggctcactgcaagctccacctcccgggttcacaccattctcctgcctcagcctcccgagtagctgggactacaggcgcccaccaccgcgcccggctaattttttgtatttttagtagagacgaggtttcacgtgttagcgaggatggtctcgatctcctgacctcgtgatctgcccacctcggcctcccaaagtgctgggattacaggtgtgagccatgcccagcctacaaaaactttaaaaaacagctgggtgtagtgacatactcctgtagtcccagctactcaggaggctgaggcaagagtatcacttgagcccaggaggttgaggctgcagtcagccgagatcaccccactgcactccagcctgggcaacagagtgagaccccctttcaaaaaaataaacatgaaagactgcctggtctcgagctgccgagtctgtggccgctcattatgcagtgccactgactgatacaccgagccggggcccaccctgcccgtgggggagggtgcccaggctcccacctgagtgccgtgagctccaccttctcatggtcgttggtgacgagctccgggatgaggctgaggtgggagatctgtgtggaggcccagccaaactggaagatcacgatgaacgggccgtagtagaggagggcagcccactcgggcgtggccgccccacagcccaggcaggggctgaagatgaaggggaaggacagcaggacgcagacggtgcctgtggaaggcagagtggtcagtcgcggggctgtcccgcaccagccagggctcccagggtgaggacatggagggaggagagagggaaactgaggcacagatggagacgccccccgcatgcacacagtcacgcaggagcgagggtctgcagtcggggtcccccaggcttatggcccctggtgacaaaaggggaatctgacaccaggtgcctgggctcagcctgcaagtcagaagaagccaggcgcagggggtcccccggaaacctgccccccacaggtgccccggttacagccgcagcctcccccagctcctccccctcggccactatcaagcctcccatagggcctcggggagcgggaggcccaggtgggcctgggctggacccctccttaagctccgccatcctcatcagctcctaaggtgaccactccctggaatgctggggcgtcctggcctccagggacagtcaggaaatagcacccgcccccacctgagatctgcggtggcaaggcctggctcttcacatcctcagaagaaaacccctaagataccctggaacaaatgtaagatcctccccgcagcccacggagccctttgcgacctgccctgtcccctccgtgccctgccctgcccttccctctctcccccttctctctctgctccagccatgcaggtctcctcactgcaggacctcttcaacatgccaggcggtcctgcccccgggcctttgcatgggcgtgcctctgcctagagctctctctcacatcttagcaagactggctccttttcacctctgggctcaacgggaatgtcacctcctcgaacacctctctcctggcccctgctgcctctacctcacccttcggagcacccgggaattctctgtctgccggcttcctgccggctttcctctgcagacagcagcctccaaggggcctggggagacccagcatggaactcgggcatttcaatatctattttttttttttttttagacagagtcttgctctgtcgcccaggctggagtgcagtggcgagatctcggctcgctgcaacctccgccccctggattcaagccattctcctgcctcagcctcccgagtagctgggactacaggcccatgccaccatacccagctaatttttgtatttttagtagagacagggtttcaccacgttggccaggctggtctccaatgcctgacctcaggtgatccacccgcctcggcctctcaaagtgctgggattacaggcgtgagccaccgcgccccgcctttttttttttttttttttttttttgagacagagtctcgctctgttgcccaggctggagtgcagtggtgcgatctcagctcattgcagcctctgcctccctagctcaagccattctcccacctcagcctcccgtgtagctgggattacaggtacctgccgccacatcccaccacatccagctaatgtttgtatttttggtagggatggggtttcaccacgttggccaggctgaagtcgaactcctagcctcaagtgatcctcctgcctcggcctcccaaagtgctcggattacagacttgagccaccataccggctgttacttcagtatcttctgagtgagtaacaatagtggccctgacacagcctgtaagcgtgggtgtcattatcctcattttccagatgggaaaattgaggcccctagagtgagtcggagccaggctccttccctgcagccctgcactcctctcctcccagcctggggcacctggaagggcccctgtaccaagcctggtggctggacctccttcctccctccggaggtgacctcatccccagaccctgggcccgcccccagagaactggaattgggaagtgaaaccaaaaccagcctctcctgctggtttctctggaactagggcctgggagggtttgcgcagattcctggggtccttggggaggtcatccgggggcagagcatgaactgtggactccagtgagaaggtcccttcctggctggactccctgttcctgctggccagtctgggttaaccattgttggggccaggctgcctggcctggggacctcgggcaagtgactgtgcctctctaggcctcagttttcagaaaacagggatagtggccaggagtggtggatcatgtaatcaatcccagcactttgggaggctgaggtgggaggactgcttgaacccaggaggtcgaggctgcagtgagtcgtgatcgtgccactgcgctccagcctgggcgacagagcgagaccctgtcaagaaaaaaaaaaaaaggccgggcgcggtggctcacgcctgtaatcccagcactttgggagaccgaggcgggtggatcatgaggtcaggagatcgagaccatcctggctaacatgatgaaaccctgtctctactaaaaatgcaaaaaaaattagccgggcgtggcggcgggcgcctgtagtcccagctactcgagaggctgaggcaggagaatggtgtgaatccgggaggcagagcttgcagtgagactccatctctcaaaaaaaaaaaaaaaaaaaaaaaaacaatgaaaagaaatgaaacagagaaagaaaggaaaagaaaagaagaggctgggtgcggtggctcatgcttgtaatcccagcactttgggaggctgcagcggatggatcacctgaggtcaggagttcgagaccagcctgaccaacatggtgaaaccctgtctctactaaaaatacaaaaattagccgggcatggtggcacgagcctgtagtcccagctactcgggaggctgaggcaggagaatcacttaaacccaggaggttgaggttgcagtgagctgagatcacgccactgccttccagcccgggtgacaaagcaagactccgtctcaaaaataaaaaataaaaataaataaaaaattaaaaaaagaagagaaagaagggtagtgaaagttcctgcccatggccaggcgtggttgctcacacctgtaatcccagcactgtggggggctgagacaggcagatcacttgaggtcagcggttcaagcccagcctggacaatatggtgaaaccttgcctctactaaaaatttaaaaattagccggctttggtggcacgtgcctgtaatcccagctactcaggaggctgacgcacgagaatcctttgaactcaggaggcgaaggttgcagtgagccgagatcccgctactgcactccagcctgagcgacagagtgagactctgtctcaacaacaacaaaacaaaaaaaaaaaaaaaagaaagaaagttcctgcctcacaggctgctgtgaggatagagttcatgtgtggcaccagcaaaagctccgtctattctgaaccacttcctgcttccgcagcttcaaagtgaggactgttcctaccttttccacagctgtttctgctacttggaatgcgcccctccacacactgctacccatccgtcaaaacctcaaagttaatgtccttccttctgaagcccatttgtgccatctgcccactcacaggagtgtttgtgtctgattctgagggtcgtctcgggattgtgggggagctccccaggacttgttaaagggcaaagtgagtccttagccaccagccccagacttgggggtgaaatacagaagtgggtgccattgccagggtaaccttcactcaagtcacctgctcaggcatcaagagcggctgcctgggcttctgctcccaacagaccctcctgaccctccaggcccacccaggtggcccccacctctcagctcccagggcaggtgccctccccgaggcggggaagaggggtgacggtggacgccttggtgtccggttggaccacctggttccctgaggtctgctttggaaaaacataaagccttcggttgctgtttctgtttgttttcttgttttggtttgttgttgttgttttttgtttttttagacagactctcgctgtgtctggagtgcagtggcgcgatcttggctgactacagcctctgcctcccgggttcaaacgattctcccacctcagcctcccaagtagctgggattacaggcgtgcgccaccacgctcggctaatttttgtactttagtagagacggggttttgccatgttggccaggttggtctcaaactcctgacctcaggtgaggaggcctcccaaagtgctgggatgacaggggtgagccaccgtgcccggcccgcccagaaattatcttacgcgactgtcaaagagcttatccaactattatgatcaaagaggcatttggggccctgggctccgctcagcaaccaatcccaacgtaaccacaaaggaagggacagccggtcccctccctgtctgccgccgcctcaggtaccccaggaatagcctggacataggaaacatgaaactccagtccccaagctgtgcctgctgcggagcctgccaccctcagaccactggagatccactgcctcttgcaaaaaatgtcatcacccagatcctgggtccaaccacccatcccagtcattgttcccaagggtgaggaggcacccgcctgcccctcctgccacctggaattccaagaactgagcaggattcctggccctgcctgctgaaatgccacatgtgtcccaaatgccaggacgcagccggcacttctgtgagggcaagaagagcagggaaggaggccggctaatcttcaggcccagggtccgggaggggagaggagggccgctgggaggcagccctgcagtcttatcgatgggcactggggcagggtgacccagcccatgacgccagcctcctgccctcccaacagccctctctaatcagggcagctcccccagacctagggggtccctgaccctggccagacagatagaggcaatgcaagaacagggcagagacccctgaccctccagtcccacccaggcggctcccaactctcaactcccggagcagcaccctcaaactgctgacgcaccaggttgccctggcagaacacacagagagagaggaggctctagggggcctgactgtccctcagccatagctgtcccagttggtcaccctaatagacgagctcaggctagacagactgacaaaggaggcgctgagcagtcaccaccaaccctccagagggttcagggtggcccgggggctcagacaaacaaaggcattcccactagaaagtcatgtagtcagatggtgagggccccgcaggtcagacagcagctctgaggcagacaggggaggctggaccaagggacagacagaggggatacggggcagttaaacagacagatgggggaggctcatggctcaggcagatagagaagccctgcacagttggacagatgggggaggcactgcacagtcagacagatgggggaggcacagcacagtcagacgggggaggctcaggccatggggcagaaagacgggggatgctggatggtgggacaggcaggggaggctcaggagtgacaccacagaggggccactgggtagtcagacagacgggggaggctcaggccacggaacagccagaggggtgaaaactcagctcatggggcagacaaacaggggagacttaggtcccaggcaggcagagagagggggctgggtggtgggactgatggaggaagctcaggccatgggcacagacagacagacaggggaggttcgggccaggggacagacagaggggtgaaaactcagctcatagggcagacagatacataggggaggttaaggccgtggacagacagtgcagggaagctcgggccacgggacagacagaccgaggggagactccgatcctgaggcaggcagacggcgggtggtgagtcagagggaggaggcgcccgggtcgcggagtctcggaggggctgcccgacaggtggcggggccgggacgcttaccgaccaggtgccaggccttgcgcgggccgtagcgggcgcagcagctggcggcgcggtcggcctcgtagcccacgagcggtgtgcacagcccgtcggccacctggcccagcagcagcagcagccccgcgccgcgggagctgtaggcgcgcaccgagtgcaggtagagcagcaggtaggtgaaccacatggacgcgcacaggtcgttgaggaagtggcccacggcgtagctcagccgcgccaccagggacagcggccgcggggacggcgccgctccggccgctgggggtcccgggcccatcgcggcgccgggcccgcgccccccacccccgggctccgcggagggtaccctggccaggccttcttgggtgccgtgggggcaggcgccggggacccccaccacgcgccgggcaccccgcgtcccgctctcttacggccgcgccctcacccacgtccgccgcgtccgccccacgctcgactctgcagccgccgggccccagagccgggcgactgcgccgggcggggcagggcggggaggttccggtgcctgagccaatcggagccgcgccccggggaaccgcagccaatcgccaaggagagaggagaggggcgtggccgcagggctcgttccgcctctacgacgggcgcccacgcggtcctagcgcccgccgggtatgagggcgaaccccgagcgcgccgcaggagtggccggcacccccatagactggggaaggaaatggaccagagggcaccgccggctcccacccagacccggcctccaggcccgcaccaccccagtccacccggagctggacagcccactgcgggccggggtggagcgagtgggacgggctctggatttggggttggggggaggtctgagcccgagctggcctcggggtccgctgactccccggcctagagagacgcgatcgggcgcggagaggacgcaacaacactaattaattggttactaacggtaatgatgggggtaatcaacataatagtaccagctggcctttaacgagcgttgcctgcaaagagccccacgtggtgacgcaaatttcactctcattttacaggcgaggaacagagttgcccgaggctcgcagtgagtcaggcgtctgtgactcccaggcctgtgcgcgcgaccctccccgtccaaccaacgtcctcccacaaacgggtcaccggactgagggtttcaagttcctccagggggtgtgtgcggttccccctaactcaggccctactccttccagcagcattttctcttctttcctctttttatttatttcagaaacagggtcttgagacgggcgcggtgactcacgcctgtaatcccagcactttgggaggccgaggcgggcggatcacctgaggtcaggagtttgagaccagcctggccaacaaggtgaaacccgtctctattaaaaatacaaaaattagccgagcgtggtgacaggtgcctgtaatcccagctactttggaggctgaggcaggagaatcgcttgacccaggaggcagaggttgcagtgagccaagaccgcgccattgcactccagcctggataacaagagtgaaacgccgcctcaaaaaagaaagaaagaaagaaagaaacggtcttgctctgtggcccaggctgcagtgcattggtgcaatcatggctcactacagcctcaatcttcagggctcaagtaatcctcctgtctcagcctcccaggtagctgggactacaggcacgcatcaccacatgtggctaacttttgtatttttaattttggagagacagggtctcactatgatgcttaggttgacctcaaactcctggtctcaagcaagcctcccaccctggcctccagaagctctgggattacaaacatgagcctctgcatcgggcgggtctccagcagttttctttctttctttctctctctctctctctttttgagatggagtctccgtctgtcacccaggctggagtgctgtgttgcaatctcagctcactgcagcctctgcctcccgagttccagcgattctcctgcctcagcctcccgagtagctgggactacgagcacccaccaccacgcccagctaatttttgtatttttagtagagacggggtttccccatattggccaggctggtctcaaactcctgaactgaagtgacccacccgccttggcctcccaaagtgttgggattacagtcacgagccaccgcgcccggcctacagcagtatatttggccttgcagtctgcagtgaggtatgattgcaccactgcactccaacctgggcaacagcaagaccccagctctaaaacaaaacaaaacaaaacaaaaggtccttgcagtatggaaggagaatcgttggatccagacttggttccactgattctctgctgctccacttgggacaagtctttttttttttgagacggagtctggctctgtcgcccaggctggagtgcggtggcacgatctcagaacactgcaacctccgcctcctgggttcaagagattctccttcctcagcctgctgagtagctgggattacaggtgcccgccaacacgcccggctaatttttgtaattttatttttattttatttttttttttttttgagacggagtctggctctctcgcccaggctggagtgccctggcgcgatctcaactcactgcaagctccacctcccgggttcacgccattctcctgcctcagcctccggagcagttgggactacaggcgcccgccatcgtgcccggctaattttttgtattcttagtagagacgggggtttcaccgtgtgagccaggatggtctcgatctcctgaccttgtgatctgcccgcctcggcctcccaaagtgccgggattacaggcgtgagccactgcgcccagcctgggacaagtcttttaacctcttggagcttgggtctcccctgatctagaacgggtacaggagttatataattggcctgccatggtggctcatgcctgtaatcccagcactttgggaggccgaggtgagaggattgtttgatcccaggagtccaagaccagcctgggcaatgtgctgaaaccctatctctataaaaaattttaaaaattaggccaggtgcggtggctcaagcctgtaatcccaacattttaggaggccaaggtgggcagatcacttgagctcaggagttcgagaccagcctgcccaacatggtgaaaacccatctctactaaaaatacaaaaatagctgggcgtggtggctgtgcctgtaatcccagctacttgggaggctgaggcaggagaatctcttgaacctgggagggctgaggttgcagtgagctgagatcgcaccactgcactccagcctgggcgacagagcgaagatccgtctcaaaaaccagaacaaaacaaaacccaaggctcaaacagccaaggggtccacggccccggctgcccacggtgatgcaggtcacacactgttttatgaaaactagactgaaaatgggcgggaggggtaaaagaggtcaagacacagaacctagaaaggaaggaggagagataaggggcagacgactcggggagataaagggttgaggagagataagaacctcaattccttcctctctgtttggcacgttcccacttagagtcctcctggcacgttcccctttagagtcctctgagggaaatgaaagatgactttttgaaatattagcctagggaccagggatcctggctcccgcctgtaatcccagcactttgggaggccaaggtgaaggggtcacttgaggtcagcagttcgagaccagcctggccaacatggtgagacccccgtctctactaaaaatacaaaaattgggccaggcgcggtggctcacgcctgtaatcccagcgctttgggaggccaaggcgggtggatcacgaggtcaggagttcgaaaccagcctggccacgatggtgaaaccctgtctctactaaaaatacaaaaattagctgggcgtggtggcgggcgcagataatcccagctactcgggaggctgaggcaggagaacggcttgaatccgggaggtggaggttgcagtgagctgagatcgtgccgctgcactctagcctgggggacagaccaagaccccatctcaaaaaaaaaaaaaaattacagtaattagccaggcgtggtggtgggtgcctgtaacccagctactccggaggctgaggcaggagaatcgcttgaacccagaaagtggaggttgcagtgagccaagatcgcgccactgcactccagcctgggcgacggaggaagaccctgtctcaacaacaacaacaaaattagccaggtgtggtggtgcacacctggagtcctggctactccggaggttgctgtgggaggatcactgaagcccaggaaacgaaggctgcagtgagctatgatcgcaccactgtgctccagcctgggtgacacagtgagactcagtctcaaaacaaaaacaaaaaaactaatgtttttcccattcctcatctcctttcatcccacaagatccctaggaggtcttacaccacttcatgctctattattttattttattattaatttttatttttagagacagggtcttgctctgtcacctaggctggagtgcagtggtgtgaccacagctcactgtagccttggcctcccgggctgaagagatcctcctgcctcagcctcttgagtagctgggactacaggtgcctgccaccacacctggctaattttttcagagatggaagtcttgctatgttgccctgactggtcccaaagagatgggattacagacgtgaggcacagtgtgcagccttcatgaccccctccactgccttttcttgttttttttgagatggagtctcactttgtcgccaggctggcgtgcaatggtacgatctcggctcactgcaacctccacctcccgggttcaagcgattctcctgcctcagcctcccgagtagctgggattacaggcgcccgccaccacgcccagcttatttttgtatttgtagtagagacgggatttcaccatcttggccaggctggtctcaaactcctgacttcaggtgacccgcccgcctcggcctcccaaagtgctgggattacaggtgcgagccactgcgcccagcccttcatgcctcttttacagataaggaaactgagtttcacaaagacgggcatgggcatgggactgtggcgggcatgggactaacaagaggcagatgtgggatttgaactcagctccacgtgacctctttatgtgctggctgcggaatgccacctgagtgtggaggaacaggtgcctcactgtccactgctttttcagcctcctttgtaggtcgagaatcaggcacaatcccgcctccctttggagaagatccagcggaggaggcagggtgtggttaaagcgccaacacatctctgcattcttgtccttttgctgttgtggtggttgttgtttgagactgagtcttgctctgtcgcccaggctggggtggagtagcacgatctcggctcaccgcaacctccacctcccgggttcaagcgattctcctgcctcagcctcccaagtaactgggcttacaggcacctgccaccacgctcggctaattttttgtattttttagtagagacggggtttcgccatgttgctgtttcgccatgttgtgggtcggttctcgaaattcctgacctcccaaagtgctgagatcacaggcatgaatcaccatacccaacgtagtttttttgtttttgtttttgaagacagagtcttgctttgtcacctaggctggagtgcaatggcgcagtctccgctcactgcaacctctgcctcctgggttcaagcagttctgtatcagcctcccgagtagctgggactacaggcgagcgccaccacccccagataatttttgtatatttagtagagatggttttcaccatgttggccaggctgctttcgaactcctgacctcaagtgatccgcctgccacagcctcccaaagtgctgggattacaggcgtgagccaccgcgcctggccacccaaagtatttttgtttgtttgtttgtgacggagtctcgcctgtcgcccaggctggagtgcagtggcgccatctccactcactgcaagctccacctcccaggttcacgccattctcctgcctcagcctcctgagtagctgggactacgggcgcccacgaccacgcccggctaattttttgtatttttagtagagatggggtttcactgtgttagccaggagggtctcgatctcctgacctcatgatccccctgcctcggcctcccaaagtgctgggattacaggtgtgaggcactgcgcctggccacccaaagtatttttaaattttttgtagagatgaggcctcatcattttgcctaggctggtcccgaccacctggcttcaagtggtcctcccggctcagcctcccagagtgttgggattataggcatgagcctcggcacctggcctctgtttttgtccctttgaagccagctaatatttcctagccctgactttgtggggtgagcaggaactaggtctgacctcttgctgaggagccccaaagattctgaagcccctgcttttgaggggagacagggatgacccctcccagttcccctcatcagggacaggactggaggagtcagaccaagaagggcggttacaaggtaggtgaggagttgggacattaccctgaggtcactagggagccatggtaggggttagagggagggtgggactgagtcagattaaaaagtccagtgggagatgaggaagggcttcttccaaatgaaggcctcagctgcgtgcgtggggaagccacaggagaggacatgtgccccaacaagagtgggggttggacgtgagggtaaagatcagagaaggccctgtctagagatgtcaggaaggcatgatgaaagctcaggccctcggggtaggacagaggagtcaggagagatcctcacagtctgatgtccccagcccatcaccagcagccccctgacgccaagcctgcgttccccctcccctggccggacatcggatgtcctgatggccgcagtccagcctcggggtggggtggggaatgtcaagtactagaggcttccttgatcttctgtgacccaggcctggggtgacagaggtgggggggtgggcagtgagggttcctgaggctgcactgaaacttccttatatctgagggtggccacggtggaggcgggggagcaggggagcaaagccaggatcaaatctgggcagtccctgacaagccaccaagcttcagttgccctctctgtaaaatgggggtgaggtgagagtaaccgaaccaaacagaataccaggaggcttcaaccacacaacttggccgggcgcggtggctcacacctgtaatcccagcacttagggaggccgaggcaggtgggtcacctgagatgaggagtctgagaccatcctcgccaatatggtgaaacctcatctctactaaaaatacaaaaaattatctaggcctggtggtgcatgcctgtaatcccagctactcgggaggctgaggcaggagaatcacttgagcccgggaggcagaggttgcagtgagccgaggtctggccattgcactccagcctcggcgacagagtgagactccatctcaaaaaaaacattagctgggcatggtggtggccacctataatcccagctactcgggaggctgaggcaggagaattgcttgaacctgggaggcagaggttgtggtgacctgagatcgcgccattgcactccagcctgggcgacagagtgagacccagtctcaaaaaaaaaaaaaaaaaaaggatggggagggagggaaggaaggacgaactctttttttttttttttttttttttgagacggagtcttgctctattgcccaggatggaatgcagtggcacgatctcagctcaccacaacctcctcctcccaggttcaagcgattctcctgtctcagcctcctgagtagctgggattacaggtgcctgccaccacgcctggctaagtttttgtatttttagtagagacgggggtttctccacgttggtcaggctgctctctaactcctgacctcatgatctgcccgcctcgggctcccaaagtgctgggatgacaggcgtgagtcactgcgcccggcctcttcagtcagtctttgcgtgactcagtctttgccaggaccctcctggcctcaggtcctgttcagtatctggtctaccattgccagaaggagcgcattctgtgagtcttgtgatttacgttttaacgttgatgctggtcagtccttgcgctgagagcaaaacggggaggagctgtaacgaagcgcggtgacctcctggcacggcagggcctggaactcggagctttttgttgttgtgttgtgttttgagacggagagtcgctctgtcgcccaggcaggagtgcaccggtgcgatctcagctcactgcaacctccgcctcctgggttcaagcagttctcctgcctcagcctcccgagtagctgggagtataggcgtgtgccaccacatccggctaagttttttgtctttttagtggagatggggtttcgccatgttggccaggctggtctcgaacccctgacctcaggtgatccgcccgcctcggcctcccgaagtgctgggattccaggcgtaagccactgtgcctgaccaacctcggtactcctgacgtttgggacatcattttttgtggtgggggccgtgtaggatctctggcctcaaccgtgtagatgccagtagcacccccctagtccgacaatgaaaaatctctctagacattactaggtatttcctggcgtgacagagttggccccggatgagaaccactgagctagagcgttttctgtaacaggtgtttgattctccctggacaatcccagccagcaacgtcataaaggtagacaaagcaattatcccacttaacagatggagaaactgaggcacagaagttgagtaaattgcccaagtcccacagttgaggctcagattgcttccctgagttcctgagggcccagcagcagtggggtgcccctcctcagaggcctgagatccctgtcccaccagccctgtgttctgccagccccggggccaggggatgctaggggcagtagctctctttccgcttccctgtcgccttctcagctctccagcatctgtttaagcaatgcctgtatgaagttgcctctataaaaagccccaggaggcttgagattgtccgtggcctgggagaaccaaccacaccctgactctccctgggtggtggagaaaagtccacacatccatgttgattaatatctattaaaaatttaaggtcaggcgcggtggctcatgcctgtaatcccagcactttgggaggccgaggcgggcggatcgcgaggtcaggagattgagaccatcctggctaacacagtgaaaccccgtctctactaaaaatacaaaaacttagccgggtgtggtggcgggcgcctgtagtcccagctacccgggaggctgaggcaggagaatggcatgaacccgggagacggagcttgcagtgagcagagatggcgccactgcactccagcctgggcgacagagagagactccatctcaaaaaaaaaaaaaaaaaattaatgggggcatgtaatcccagtactgtggtactgtggtactgtgggaggctgaggcaggaggatcacgaggccaggagtttgagaccagcctggccaacatggcaaaacctcatctccactaaaagtacaaaaattagtctcgcatggcgatgtgtgcctgtaaccctggctactctgaaggctgaggcacgtgaatcacttgaacacgggaggtggaggttgcagggaggtggaggttgcagggagctgagactgagccactgcactctagcctgggagctgggcaacaaagcaagaccccatctgtacgaaaattaaaataatcagccagatgtggtggtgcatacctgtggtcccaactgctcgagaggctgaagcaggagaatcacttgagcccaggagttcgaggttgcagtgagctgagatccgatgactacactccagcctgggtgacacagcgagacaccatgtctcaaaaaataataatagtaaaaaataccctttatctgagcgatattattgagtaaacagaactggttgcagttgaagcttacagcatgaaggcactggtataatacacagcagaataggacctcacatttgtttgcttacttttattattatttttttttgtagagacagggtctcactatgttgtccaggctggcctcaaattcctgggttcaagcaatcctcctgcctcagcctcccatagtgctgggattacaggtgtgagctactgcacctggccaggacctcactttatttatttatttatttttttgagacaaagtctcgccatgtcgcccaggctggagtgtagtggctcgatcttgactcactgaaacctctgcctcccaggttcaagcaattcttgtgccgcagcttcctgagtagctggagctacaggtgtgcaccaccatgcgtggctactttttgtatttttagtacagacagggttttgccatgttggccaggctgttcttgaaatcctgacctcaggtgatcggcccactttggcttctcaaagtgctgagattacaggcgggagccaccacgcccagcctatatttttatttatttatttactattttttgagagggagtctcgctctgtcacccaggctggagtgcagtggcacgatctcagctcactgcaacctccgcctctaggttcaagtgattctcctgcctcagccttctgagtagctgggactacaggcgtgcacccccatgcccagctaatttttgtggttttacttttttgtagaattttttttttaactgtgaatacacattttttatttggtcatttttgcttacaattgaaactctgggaattcaaaattaacatccttgcccatgagcttcttatagacaccagaaaaagtttcaaccttgtgttccatattgttctgctgtgccttgtccaaatgaacctttatgagccggctgccatctagtttcacgcagattctctagagtttcaactgtaagcaaaaatgactaaataaaaaatatatattcacgttaaaaaaattttttttttttttttgagacggagtctcgctctgtcccaggctggagtgccgtggcgggatctccgctcactgcaacctttgcctcccgtgttcaagctattctcctacctcagcctcccaagtagctgggattacaggtgcccgccaccacgcccggctaatttttgtatttttagtagagatggggtttcaccatgttgaccaggctggtctcgaactgtggacctcgtgatcctcccacctcagcctcccaaagtgctgggattacaggtgtgagccaccgtgcctggcaatttttgtgtttttagtagggacagggtttctccatgttggccaggctggtgtcaaattcctgacctccagcgatccacccacctcggcctcccacagtgctggcattacaggcgtgagccaccgcgcccagcccacgtctttattaggaatacgcacatgtgtacgtgtgtaggcatgtgctgtgggtggagtcatgtccccacagaatgcacaggttcctgtcctaatccccaaggcctcagaatgtgaccgtatttggaaaaaggtcattgcagatataatgagttaagatgacatcattagggtgggccgtgacgcagtatgactgctgtccttatcaaaagaggaaatttgggtgcagacacgcacatagggagaaccccacatgaagatgcaggcagacatcggggtgtcactcctacaagacaagaaaagcccaggattgctggccaatgccagaaactgggagacgccagggacagattctctccccgccctcagaaggccccagccctacccacaccttcctcttggacttctggcctccagaactgtgaaacaataaatttctcttgtttaagcccctcagtttgtcgtaattattacctagcaaaccaatgcagtgtggtgtgcgtgtgtgtgtgtgtgtgtgtgtgtgtgtgtgtgagtgtggctaggaaaaattttaaaaagagatgcggccgggtacagtggctcacgcctgtaatctcagcactttgggaggccaaggtgggcggatcatctgaggtcaggagttcaagacctgcctggccaacatggcaaaaccccgtctctactaaaaatacaaacattagctgggtttggtggcacgtgcctgtaatcccggctactcaggaggctgaggcaggagaatcacttgaacctgggaggcggaggttgcagtgagcaaagatcacgccactgcactccagcctgggcgaatgaaactctatctcaaaaaaaaaaaaaagaaaaaaaaaaggcctggcacagtggctcacgactgtaatcccagcactttgggaggccaaggcgggtggatcacaatgtcaggagatcgagaccatcctggctaacacggtgaaaccccatctctactaaaaaatacaaaaaaattagccgggcgtggcagcgtgtacctgtagtcccagctacttgggaggctgaggcaggagaatggtgtaaacccgggaggtgaagcttgcagtgagccgagatcgcgccactgcacactagcctggacgacagagcgagactctgtctcaaaaaaaaaaaaaaaaaaaaaaaaaaagcaataagctgacgataggaaatgtaatgaaattaaagaggtctgagctgcacttccttaattctgtacaagtgaaatggatgtgaacatgatttgcataataaaaattaattagaaaaccaaagaattataaggcaagtcatccttaatggagagcttccacctctaggattataaattggtatactgttcctggcttcatgctataaaaactggcaaataaatcatagtaataaatgacaaaaaacaaacaaaaaggccgggcgcagtggcccacccctgcaatctagcaccttgggaggccgagacgggcggccacctgaggtcaggagttcaagaccagcctagccaacatggtgaaaccctgtctctactaaaaaaaaaaaaaaaaaaaaaattagccgagcgtggtggcggatgtctgtaatcctagctacttgggaggctgaggcaggagaatcgtttgaacccgggaagcagaggttgcagtgagccgagatggtgccactgcactccagcctgggcggcagagcaagactccatctcaaaaaaataaaataaaataaaataaaataaataaacaaaataaaataaatgttcaattaaattgttattgactatggccgggaggggtggctccacacccagcctcacctagactatttttaagtgagcagagagacacaggggaggcctgggaggtcagagagctgattaagcaacagagccaggtctggcgtgtggaaccgtccagattccagggccagctcctcttcctcagccccgggctgcatcttaggacaatgggcttattgagacttaactcacatataatgcacccatttagagcatacaattccatggtttgtaatatatttccagagtcacgcagccatcactgaaatcaaattgtaaaatactttcatcacccaaatgaaaaccgcatccctctcagtggtcattccccacccactggcacccacacgtccccctcctgtctctgtggatgggcctttcctgaacattctgatcacacactgtgtgacctttgtgtctggcgtctctcactgagtgtgatgtcttctaggtacatccatgctgtgacttgtgtcagagactcgctccttttttttatggctgataatattctttttttttttttttgagacgtagtcttgctctgttgcccaggctggagtgcagtggcacaatcttggctcactgcaacctctgcctcccagttcatgggatcctcctgcctcagcctcccatgtagctgggattacaggcgtgcaccaccacgcctggctagtttttgtatttttaatagaactggagtttcaccatgttggccaggctggtctcgaactcctgacctcaagtgatccgcctgcctcccaaagtgctgggattacaggcgtgagccactgcgcccggcccatggcggataatattctgttgtaaggatatatcccgtcatcgatccatgcatcattagcagacgtttgagttgttttcactttttggctattatgaatcacgctgctaccgacgcttgtgtacacgcttttgtttgaacacctgttttcagttgtctggagtatattcctaggagtgaactgctgaattgcatggtgattccacatttatttaaccctttgaggaaatgccagtctgttttccaaagcagctgcatctgcctcctagacatctgaaggattcaatgaatgtgtattgagcatccaccatgggcaatgctgtgaaccaaacaggcaggccacagggagaagccgacttatggaggcaaaaaaaaaatcagagaaggcctggctgagcaagtgacatttaagcggacttgaggaagaggaagtgggccgggcgtgggggctcacgtctgtaatcccaccactttgggaggccgaggcgggtggatcacgaggtcaggagttcaagaccagcctggccaagatggtgaaaccctgtctctactaaaaatacaaaaattagccgggcgtggtggcaggcgcgtgtaatcccagctactcgggagggtgaggcagagaattgcttgaacccgggaggcagaggttgcagtgagccgagatccagccactgcactccaccctggacgacagggtgagactccgtctcaaaaacaaaagaggaggtgagcagccccaacttgggccagaagcctagactgctgctgggaggtccctgatccaccagagcggagcctcctgacccatcctcacgaagtccttgccatctcccttcaccaccatctttccccaaacacttccagcccagctcccaaccccaccccctgcctgacccacacccagttctcagcttcccagcatcccagtctctctgtcctggatatcgtgtgatgtccccgttgcacaggggggaaagccgagaccccagagggagagcagcccctatggccagaagccctcggatccggacgtcgggggctctaaactgagtaaatacataggaaacttctccgctaggttttgcaggatgttaagaacaggtcccaccttgcctagggctggggactgcctcgcaggaccttaaccctagcaacccacctccgtccccatggcaaccggggcggggcccgacccggatccgccggtcgccccatccggcagcggctgggagtcttgccttcagagagggaggaggagtccgcgcctctcctactggccctttaagaggctccgcccggcaagtccgccactcgctcccgattggtcccgagcgcggccgagcgcagccgaacttgacgcaccgcccgcagccttccttaccaacctcccacgcgactcagcaacctccccaaccaatcgccggccggcgcgccgatcggtatctgcatgggctcgcccggggggaaggtctcacccaatgggaccgttcgccgaggccttcattagcatgccgggggcggggaggggcggggcggccgacgggggcgggctgcgggcggttggttggagcgtcgcgcagtcgggaggtccgggaaagtttctttggaggtgaaaacagccgcggaactccgggccctgagagggggcgggggtgcaggggtcccagggccgggccggggtctttcctggcccgggggaaaccggcccaggcctcccggggggggcaatcgcccaacaaaggattcttggggcgcccgccctcgaggacttccctgcccctggatccggcccccccagcgctccgggcccggcatcccggggctctccatcgcggggtaccccagttcgcggtctgccatcgggcagcccgggcgctactcacctccgcccgcgtccgtgttccaggtccggcccggagcggccatgtcccacggccccaagcagcccggcgcggccgccgcgtgagtgcactgatcccctccccacgccctcgctactttcccggctgcagccctagctcctgaacccctgacccagtccctcccgccggagtcttgactcccccacctgggtcagggggcttctccctccacccaattctgcaccccccacctcggcctccagtccctcccaggagccccgcttgtcccaccttccccggatactgaccccatcagaccctgcctcctcgggctcatgcactctcgctgcagccccgccgtcgggggtcaaaacgccctggggtgggcttttgggggaggggagattcttgggacggggctgaccgcggtatccttggctccaggccggcgggcggcaaggctccgggccagcatgggggcttcgtggtgactgtcaagcaagagcgcggcgagggtccacgcgcgggcgagaaggggtcccacgaggaggaggtgagagtccctgcgctgagctgggggaggccccgggctcccgccccagcctcgaagccccgccccaggctggatttgaattgcttgtggctccgcccacagcccattttcctctggaagctgagaccccgccccgtgccagctgccacgcccctgacaggtcctctgccactctaagtccaggccccgcccaccgcacaatgccagctctgcccactctaaggtcccgcccacttccactccttgggggcggcaccctccccttggtcctgtgggcccgttctccagcagaaaaccacgcccaccaagcagaggccacgcccacaaccgaagtcaacgccaaccctgtactcaaacctcggcccatagttcctcagatcccctcacccctggccagggatccctctaacccaccgtgtcccgactgctgaccgggccctacctccatcttttccgggttcttcctcccagctaggccccgcccccatccccgcccatacgcgttaggccccgcccatgcccctctgagccctgccccagtacgccaggcccccctcccaacgacgcagcccggttctgcagccggtgaagaaacgcggctggcccaagggcaagaagcggaagaagattctgccgaatgggcccaaggcaccggtcacgggctacgtgcgcttcctgaacgagcggcgcgagcagatccgcacgcgccacccggatctgccctttcccgagatcaccaagatgctgggcgccgagtggagcaagctgcagccaacggaaaagcaggtgggcggggcggggcgccgagcagggctggcggggtccacggactaccccccagtagccccgacccccaaaggattccacgtgcagggtttttccttcttcctggagaaatgcccacccataaccaactttttttttttttttttttgtgagatggagtcttgctctgttgcccaggctggagtgcagtggcgtgatctcagctcactgcaacctccgcctcccggcttcaagcaattctcctgtctcagcctctcaggtagctgggattacaggcgcgtgctaccatgccctgctaatttttgtatttttagtagaaatggggtttcgccatgttggccaggctggtctcgaactcttgacctcaaatgatccgcccacctcagcctcccaaagtattgatattaaaggcgttagccaccgtggccagcccatgaccagcttttgggggcgcggctagcaagaggcaagacagattgaaaactggatgaccaacaaagatatgtctaagaagtcaggatggggcctggattttttgcgaaacccgattttcatatcctgttagtttaaaaattgcaaaaacatcacggaaatgtaacaaaagccatcactgctttgcatccctgtaagtgagatttcaaagagagaaacgggtgcgggagggagtccaggcatccgcatacgctggaggttgggttcctgcccatgactctggcgtccgggagtggtttgtcagggctggaggtggggaagagtccggggcatgggaagtgaggtgggagctcggaggtccctgagcaacaggctgaggagccggttctgtctgcctggagggaatagggagctatagaaggttcaggagaggggagggtgctgtgaaagcagagtgataaagactggatcctggcgttggaggcttcccctgcttcaagccttctggtgctgccccccagcggtacctggatgaggccgagagagagaagcagcagtacatgaaggagctgcgggcgtaccagcagtctgaagcctataagatgtgcacggagaagatccaggagaagaagatcaagaaaggtgggaggggtcgggcgcggtggctcacgcctgtcatcccagcactttgggaggccgaggcgggtgtatcacctgaggtcagaccagcctggccaacatagtgaaaccctccccctctactaaaaatacaaaaattacctgggcgtggtggcgggtgcctgtaatcccagctactcgggaggctgaggcaggagaattgcttgaacccgggaggtggaggttgcagtgagccaagattgcgccattgcactctagccagggcgacagggcgagactccgtctcaaaaaaaaaaaaaaaagaaaaagaaaaatgaaaggtgggaggggccggtgcgagcagttggggtcctgctctgtggggtgcgacctcagcccaggcagggcctccctccgtggggcacagtcccgtgggttgggcgggggaaagatacatagccagacaggagtgaagggggctcactcggtacagcgatgggggatgcccagacgcggggcactcaagtggggagctggagccggctgagcagcgctgacctagggtgcagggcgtggtccctggaggcctgggaggctgaccctgcccttcccctcccccgccagaagactcgagctctgggctcatgaacactctcctgaatggacacaaggtaagcgaccttcttcctctcaaagcacctgggggagaaaggtctggaggcttctagaaccctgagtcagagccagtgctcgcccagatgtgtgcaagcaggggcggtgccactgcaccgtgggatcgctgttgattgtactcccaccggggtgtcccaggagaccctcctaggcttggggcacacccagagagcgtggctgcctcctaccaccagtaaattgccaccttgtcccttcgtcttagggtggggactgcgatggcttctccaccttcgatgttcccatcttcactgaagagttcttggaccaaaacaaaggtgagcggtaactgcgctcctgatgcgaactccgtgaaactgggtggtagaggggggcgtgggccaggagggccccaagactgcaggaggcggatcgggaggttccctatgagcgtccaggcgcacgctgtcgctccagaggctgatgtggagcaggaggcagagggcgcagtgagggaaacctgggcaggggcacgtcccgggcaaaagcccggaggtaggggaaaggggaggcgcaggctttgaccccgctccccccggcgcagcgcgtgaggcggagcttcggcgcttgcggaagatgaatgtggccttcgaggagcagaacgcggtactgcagaggcacacgcagagcatgagcagcgcgcgcgagcgtctggagcaggagctggcgctggaggagcggaggacgctggcgctgcagcagcagctccaggccgtgcgccaggcgctcaccgccagcttcgcctcactgccggtgccgggtgcgggccacgcccatctcccagtcccgccccggtcacccggccccgcccgcctccccccccctcctcccttccccccttcccctgtcgcccggcgccgcccatcgccccgtcccctcttccccagtcacccggccccgcctatcgccccgccctcatcacccccagctccgcctcctccccgacccccgcacccctaccccatagctccgtctggttcttcccagaccacacccgagctccgctccgcgccccgttactcggccggctccctgacctcgcccccaccgaccgcgcctcccggccacgacctctcccgacgcgtccccgcttactcgcttcctcccgcagcccctttgtgcccccacccttcgcgcccccaccgctccctaccggccccaccgtcgctggcccctctccctcgccagcccccgaccagcctgagcactgacccagcctccccgctcgccacgccacgttcccattcaccccacctccccacgcccccgtcacccatccctccccacgccccgctgacgcctgagccccctccaccaccccagtcacgtcccacgcgaccccagccccccggtgtcatccccacctccccgacctcgttccctccgtccgtgactgtcctcagcggaccctggacgcccgccgctctagccccgcgtccccaccctgtccccgtcctcgccatcctcctgccccggcttaccttagcccaccctgcgccgctcctgcgctggcggtgtccggacctctgagcgcccgcgcgacccgccctgagtcaccccctaccgctgcccctggagcccccgccccgcgactccccggcaccctcgcctgaccttcccgcctgtcccccaggcacgggcgaaacgcccacgctgggcactctggacttctacatggcccggcttcacggagccatcgagcgcgaccccgcccagcacgagaagctcatcgtccgcatcaaggaaatcctggcccaggtcgccaggtgtgtgccgggcgaggcggggcggggccggggttcaaggcccggatgtgcccgccctggggttccccaggtccgcgagggctgctgggtgggactccgcagcttactagagatcacctcccggaggggcctacctgcggtcgcccctgatgcaccagtgctaggatggccatggagaaccccgggccggcgggacccactcgggggcaccagaacttccctaaagcttctcagggtggatcccagcgcccgggttagataggttcaacgcctgtcccccaaccctggcatctgttggagcagctgatgggccatggtctctggggttccccagggccggggtgggggccagagatgatgagggcctcatcccgggccctcctctctcgtttcagcgagcacctgtgaggagtgggcgggcccacgatgcagaggagaagctgtgggcgcggccctgccacaccccaccccgtggacgagaggctgggggtccaccctttggggcctggtcccatcctgcaccttgggggctccagcccccctaaaattaaatttctgcagcatccctttagctttcaatctccccagccccctgaacccggaaaaagcactcgctgcgcgatacacccagaagaacctcacagccgagggtgcccctcctcggaggacagccacgcgctacactggctctccgggccacccccaggacacagggcagacgaaacccacccccagcacacggcaggaccccccaaattactcactacggggggctgtgccataggccacacaggaagctgccttgtggggacttacctggggtgtcccccgcatgcctgtaccccagatgggtgggggccggctttgcccatcctgctctcctccagccgagggaccctggtgggggtggctccttctcactgctggatccggactttttaaataaaaacaagtaaaatttgtgttttaagcttgtgagtgtgtaagcttgtttggggtggtgtggagggttcagaaggtgcagcctgggccccccatgacattccctgctgggggcgccaggcctgctctctttacctctagcagagcctcagagtttctcagatagggagacgggagcccaaacttgccggggttcacagagcaagtcaatggctgggcaggtgtctccatccctcccctacctaaagttgggcattgtgggctcagcacacgtgggggacttgaagcacaggggacagtcacggctgctcagttcatccttcaacttgtgtccgcacgggggttcaagtccactttgtagcacagtgactttgggtgggccacggttttgtttattgtgtaaaatacgcaacatgaaccttaccatcatagccattttgtttatttattggagacgcggtctcactctgccacccaggctggagcgcagtggcccgatcatagctcactgcagccttgaactcctgggctcaagcaatcctcctgcttcagcctcccaaaccctgggattacaggcgtgagccaccgcgcctggccattttagccattttaaaatgcacaattcagtggcatttagtacatcacaattttgtgcagtcatcacctttatctaatctcaacgcattctcatcacccccagaggaagtcctgtcctcatcaacagtcactctcatcccctccccagctcctggcacccacaaatccccttcctgcctctgtggattgacgtgtcctggatatgggaccacacactgtgtggccttttttttttttttttttttgagacagagtcttgctccgtcacccaggctggagtgcagtggcacgatctcggctcaatgcaacctccgcctccctggctcgagtgattctcctgcctcaacctcctgagtagctaggactacaggcgtgtaccaccacactcagctaattttttgtatttttagtagagatggggtttcaccgtgttagccaggctggtttcgaactcctgacctaggtgatctgcccgcctccgcctcccaaagtgctgggattacaggtatgagccaccgcacccggactatatgtccttttgtatctggcttctctcactgagtgtgattgtcctccagatttatccacgctgtggcctgtgtcagagcctcattccttttggtggctgagtcattgtccagtgtgtggatgaatccgctgtattgaccccatctatctgtcaaaggacacttggctatttctaccacttgtgagtcatgctgctgtgaacattcatgtacatgtttttgttagaatgcacattttccattcttttggagatacagattgctgggagttctgcatttggcttgttttgtgtacgtgtgtgtgtgtgtgtgtgttgcttattgagaaacctttccagggacttctgcgtttaatggcatacataagacatcctaaaaaattcggagaataatctgaaccccagaacctctgaacgtgaccttatttggaaatagggtcactgcagatataattagttaagattaagtcattactggagtagcataggccctaagtccaagatgactgctctccttataagaagataaaatctggacacagacacagagaagagacagccaagtgacaacagaggccgagactggagtgatgtatctagaagccaagaaacgttaaggaaggccacccacagccagaagctgtggatgccaggaaggattcttcccaggggctccgagggccctgccaacaccttcattgtgggattctggcctctggagctgtgagaggataagtttctgctgtgttatgtctccctgtttgtgatgctttgtttttgtttattttttattttttaggggttgggggggggtctcactatgttgcccaggatgatcttgaactcctggctcaagtgtcctgctgcctgggcctcccaaagtgctgggattacaggcgtgagccattgtgcccgcccacctccatcccacactgcttcttcttcttctttttcttttttttttcagacagagtttcactcatgtcacccaggccggagtgcaatggcacgatctcggctcactgcaacctccaccatccaggttcaagcgattctcctgccccagcctcctgagtagctgggattacaggcgcccaccaccatgtctggctaattttttatattttagtagagatgtgatttcaccatgtcagccaggatggtctcgaactcctgacctcaggtgatccacctgccccagcctcccaaagggctgggattacaggcgtgagccaccgtgcccgacagctttttttttttttttgagacagggtcccactatgttacctaggctggagtgcagtgtcgcaatcatagctcactgcagcctcgacctcctgggctcaggtgatcctcccacctggttctcgtgagtagctgggaccacaggtgcctgccatcactcctgcctaattatttatttaatttatttatttatttatttttctgtgagacagagtctcgctctattgcctaggctggagtgcaatggctggatctcaggtcactgcaacctccacctcccgggttgaagcgattctcccacgtagctgggattacaggcactcaccatcaagcctggctaatttttgtattttgagtagagatggggcttcaccatgttgcccaggctgatctcaaactcctgacctcaagtgatcaacccacctcagcctcccaaagtgctggaattacaggcatgagccaccatacccagtcaatttattggtatttgtgagatggggtctcactatgttgcccagactggtcttgaactaccgggttcaagcgatccatctgggccagcctctcaaaacgctaggattacaggcataagccactgcacccagctgtttctttgtggttgagacaggatcttgctctgtcacccaggctgaagtgcagagatgccatcacagctcactgcagcctatacctcctgggttcaagcaatcttcccatctcagcttcccaagtagctgggactacaggtgtgtgccaccacaccccgctaattttgtattttttgtagagatggggtctcaccttattcctcaggctggtctcaaactcctgggctcaagtgatcctcccgcctcggcctcccaaagtgctgggatcacagtcaagagccacctcaccacacccagtttttggtgctttgttacagccatcatgggcgagtcagacaacctgatactgccaacccccctcactccccaccccagtttcaccctgtcctggcacaggtaccaccaccttaaatttagagtttctcatttctaggcaggcctggaaaatagcattttgcagcagttttttattaaaaaaaatttcagtatacaattcagtaggttttggtacattcaaaaagctgtgtgggctgggcacagtggctcacgcctgtaattccagcagtttgggagaccgaggcaggcagatcacttgagaccaagagttccagaccagcctggccaacatagtgaaacccggtctctactaaaaatacaaaaatagccagggatggtggtgcatgcctgtaattccagctacttgggagactgaggcaggtgaatccctctctctctctctttttttttttttgaggcggagtcacgctcttgtctgtcccaggctggagtgcagtggcgcgatcttggctcactgcaacctccgcctcccgggttcaagtgattctcctgtctcagccttccaagtagctgggattacaggcacatgacaccatactcagctaatttaatttttgtatttttagtagagatggggtttcatcatgttggccaggatggtcttgatctcttgaccttgtgatctgccttccttggcctccccaagtgctgggattacaggggtgagccaccagacctggccttttttttttttttttttttttgagacagtctcactctgttgtccaggctggagtgcagtggcatgatcttggctcactgcaacctccgcctcccaggttggagcaattctgcctcagcctcccgagtaactgggactacaggtgtgcgccaccacacctggctaatttttgtgtttttagtagagatggggtttcactgcgttgtccaggctggtctcgaactcctgacctcaagcaatccgcctgcctcagcctcccaaagtgctggattacaggcatgagccaccgtgcccggccttacataaaatttcttacctcgtccaaaccctcctgccactttcttttctctccccatgttcagtttgtgaggctcctcctgggcggaggctgtgactggctctgctgtagggcccgccactgcaggcaggatggctgtttattgagccgacattcctgggtaggaatctgatggatacgtaggtgtttctgacattgcactccagcggatttttaccaacgcctcctggtgcctggggtctcctccttcatctgtgacctggacatccgttcattcctcaccaaagatcactgggcacctgctgtatgccaggcactgtgccctggacactgggcatggggacagagcaggggaacagcccccaccctcctggagctgacattcctccagtcctggggacaaacaggacaaaagatgaaatgaaatatcagcagggggctggggctcaagcctgtaatcccaacattttgggaggctgaggcgggaggattccttgaggtcaggagttcgagaccatcctggccaacatggtgaaacccccgtctctactaaaaatacaaaaaaaattagctgggcatggtggcaggtgcctgtaatcccaactaatcaggaggctgaggcagaagaatcgcttgaacccgggaggcagaggttgcagtgagccgagatcgtgccactgcactccagccttggcaagagagagagactccgtctcaaaaaataaaataaaataaaatatctgatatgtcagatggtagctttaaatgctgaagagaagctgggcacagtggctcacatctgtaatcctagcactttgggaggccaaggctgaaggatggcctgaacctcctggtcttgagtttgagaccagcctgggcaacacagtgagatcccaactgtacaaaaaattaatcatgtttctaaattaaattttaaaaaactgaatgcggccgggtgcggtggttcacgcctgtaatcccagcactttgggaggccaaggcaggtggatcacctgaggtcaggggttcgagacaagcctgaccaacatggtgaaaccctgtctctactaaaaaatacaaaaattagccaggcatggtggtgtgcgcctataatcccagctactaggggggctgaggcaggagaatcgcttgaacccaggaggtggaggttgcagtgagccgagatcacgccattgcactccagcctgggcgacagagctagactccgtctccaaaatcaaacaaacaaaccaaaggctgggcgtggtggctcatgcctgtaatcccagcttttttggaggctaaggtgggtggattcctgaggtcaggagttcaagaccatcctggccaacatggtgaaacctcatctctattaaaaatacaaaaaaattagccgggcatggtggtatatgcctgtaatcccagctactggggaggccgaggcatgagaattgcttgaacctggtgggcagaggttgcagtgagctgagatcgtgccactgaactccaaactgggtgacagagcgagactccagctcaaaataaataaataaataaaaataataaaataaaataaaacaatgacctcgcctagcagagggtgagtgctccagcaccctcagctgtccctgtccttttttttttttttttttttttttttgcgacggagtctcgctttgttgcccaggctggagtgtaatggcgccatctcagctcactgccacctccgcctcccgggttcaagagatctcagcctcccgagtagctgggattacaggcgcccgccaccacgtccggctgatttttgtatttttggtagagacggggtttcaccatgttggccaggctagtcttgaactcctgacctcaggtcatctgcccgcttcggcctcccaaagtgctggaattacagacgtgagccaccgctccaggcctgtccctgtccttatttgtggtccctgttcttccagggtcctgagctcaggcccccccggactgcgggtatccccggggagggcacagctggccctggcagggcccggacacctggggcccgacccacccctgcgcaccccgcggtgtcgccttcccgggaggctcgggttcccagatccccttacccgggcgtctcggctgtcgcgccctgggccgggggaggggaggctgcaggaagcggcggatccggcggcggcggcgagggcccgggtgggtggccgaacttctcccgccatggagggagcagcggcccgggaggcccgggggaccgagaccccgcgcgcgtctgcgcccccgcccgcgccctcggagcccccggccgcgccccgcgcccgcccgcgcctcgtcttccgcacgcagctggcgcacgggagccccacgggcaagatcgagggcttcaccaacgtccgcgagctgtacgccaagatcgccgaagccttcgggatcgcgcccaccgaggtaaggagcccggacaccggcgcccaagaccacccgcctgatggggtgaggggtagggagcttggaccctggacgggagaccccagatccccggatcccagacgtcggggtggccgcctaatcgccggatctcagagacccagccctcagatcccggggtgccacactcccaggggccccctttgcacgctctgcgcaaaagatgggcaggtcttaggactagcggacccctagatattccagaaaatcctctgcgcagacctagcttggagcggaccccagccctcggggaagcgcctctgtgcttcctgggcgtagctggggtctggggttccagatggcccccttagggatgggaagtttgaggccgccgtggggttggggggttcctgggcgtttttccaatccgggttcgtttggtttgcagcccccagggggcgccagcagattaaacctggaggtctgggggctggaggtcccggggtatggagaggggtctccacctgctggaagtctccttctccctcctctctctgttctgggggtcccacgccctgccctttcccatgggctgggatcctggtcgctgggggcaggggcctgcgcagacagggtggctgcgtggggggatgcatgccctggctaactctaggctccttctcccccgggaagattttattctgcaccctcaacagccacaaagtggacatgcagaagctcctggggggtcagataggcctggaggacttcatctttgcccacgtgcgaggcgagaccaaggaggtggaggtcactaagacagaggatgctctggggctgaccatcacggacaacggggctggctacgccttcatcaaggtgcccgggagggggtgggcgggtggcttcctggggtccagcaactgccccccccactctgggtcgacgtgggttctgcggattggaggcgggtggctggggttgccctgccagcgacgctggatccctgcagagaatcaaggaaggcagtatcatcaaccggatcgaggcagtgtgcgtgggtgacagcatcgaagccatcaacgaccactccattgtgggctgccgccactacgaggtggccaagatgctccgggagctgcccaagtcccagcccttcaccctgcgcctggtgcagcccaagagggccttcggtgaggcgggtgggctggcgggagctcttcccgaagtgcgttctacggatgcctggggtggaggagggtcggggatgggacgggctggaaggttctaggtgcacccgctgcgtgccaaggagctcctggcagggtatcagaaactcgtaggtagtttctattaatagattgttatggagtcagcctgtgggggaggggtgggggagagactgggtaaagtggagttggaggaggacgcgtccagaaccactttggagccaggctgggagacttgtttttgtttgtttgtttgtttgtttgtttttgagacggagtctcactctgttgcctgggctggagtgcaatggcgcgatctcagctcactgcaatctccacctcccgggttcaagcgattctcctgcctcagcctcccgagtagctgggactacaggcacccaccattgcgcctggctaatttttgtatttttagtagagacggggtttcaccatcttgaccagtctggtctcgaacttctgacctcaagtgctccacccgcctcagtctcccaaaatgctaggattataggcgtgagccaccgcgcgcagcctgggaacttttaaagcagtgctttgaggtcatggtggattgtagagaatgagaatatgagaaaaaagttttctttcttttcttttttttttcctttcttttttcttttcttttctttttttttttttgagacggagtctagctctgtcgcccagactgcagtgcagtggctagatttcagctcactgcaagctccgcctcccgggttcacaccattctcctgcctcagcctcccgagtagctgggactacaggcgcccgccaccacacccggctaattttttgtattttagtagagatgaggttttaccgtgttagccaggacggtctcgatctcctgacctcgtgatccgcccacctcggcctcccaaagtgctgcgattacaggtgtgagccaccgcgcctggccgtgccagctaatttttaatttttttctttttttgagacggagttttgctcttgttgcccaggctggagtgcaatggtgtgatctcggctcaccacaacctctgcctcccaggttcaagtgattctcctgcctcagcctcccaactagctgggattacaggcatgtgccaccatgcctggctaattttgtatttttagtagagatggggtttctccatgttggcaggctggtctcgaactcccgacctcaggtgatctgcccgcctcggcctccgaaagtgctggaattacaggcatgagccactgcaccctgcccattttttttcataactagactttctcaatgaagaaaacagtgtattgatttacacactagcacattctcctcatgtagccatgggttggccctttggatagcgttgttctatagaacagagacagagattctagaagtgccccagcacacatggagagacgtcccagggagagtgagctgtatggggttctagaatctgccctgccgtggctgtgaactccaaaagccatgcctaaaaatagagtttaggccgggcgtggtggctcacacctgtaatcccagcactttgagaggccaaggcaggtggatcacctgaggtcaggtgatccatcgtatcaaaaaaaaaaaaaaaaaaacctggctgggtgcagtggctcaagcctgtaatcccagtactttggaaggccaaggcgggtgcatcacgaggtcaggagttcgagaccagcctggccaatatggtgaaaccctgtctctactaaaaatacaaaaaattagctgggcatggtggcaggtgcctgtaatcccagctactcgagaggctgaggcaggagaatcgcttgaacctgggaggtggaggctgcagtaagccgagatcgtgccattgcactctagcctgggtgacagagcaagacaacatctcaaaaaaaaaaaaaaaaatcaagcttagtctgagactaaacccagctctagagcccaggccagctctcagaccaagccctgctcttaagcccaggccagctctgagactaagtgtgtttctagcacctcagtcctgacactaagccgggttctggaacccagacaagaacatatctagattgaggatcctaccacaaggagggtcccaagcagtcccttctagagaaagtcgctagaagagggagagtgagggcatggaactgggatgttagttctaaacctgctccattacaacacctcattctggacttgtgatttagtttgctggggatgcgaagtgtggaatctcgaataggtctctggagacttgccgtacagatgtaaggaggactttgaaggggaggaagattctagaaaggctcggctgttggcctcccagggtttacaaagatgtggctccacccagaacccatggccatccctcactctgttccctccagatatgattggccagagaagtcggtccagcaaatgtccagtagaggcgaaagtgaccagcgggagggagaccctgcggcttcgttctgggggggctgccacagtggaggaagcggtgagtgaaggggaggggctctccccaggcttctgcaccttcagctcctccactgagtcagtgcggtcttgggtaagaacttctcctcggagcctcagtttctctgcctgcaaaatgggtcctcattgaaaagtggggcaatgatgttggtaccagcactactgactcgtgtgagggtccagtctactcttcccttaggggtgggggtcgggagggggctgggctggagggctccaaagcttttcacccctgacttccctcccgtgtgcccccagcccagtgagtttgaggaggaggcatctcggaaggttgatgacctgctggaaagctacatgggcattcgggaccccgagctgggtaaggggccagggtaagccagggggccctggggggagggaagcctacgggaggaggcaggggtcccagcgggaagttgggcgcggggagtgccctcactgacatcccctctggcacggcccgcagcgtccaccatggtggagacgtccaagaagacagcgagcgcccaggagtttgcacgctgtttagactccgtcttgggcgagttcgccttccccgacgagtttgtggtggaagtgtgggccgccatcggcgaggccagagaggcctgtggctagtttgccctgggggggcccagcacagccccagcccggagcccagccccctgccccggccctgctccagaacccagcccagatcggaggacaagttcctctctagaacccaatccaatttggagccccagcccaactccagaacccaacccttctctagaatccagcccagatctgaggccaagctatgtgctagagcccaggccagctctgagaccaagcccagcattgagaataagctctgttctaaaactcaggccagccctgagaccaagcccagctctagaactcagatgagctttgagaccatgcccagcactgagaccaagccctgttctagaactcaggcctgctctgaggccaagcccagctctagaacccagatgagctctgagaccatgcccagctctagaactcagatgggctctgagaccatgcccagctctagaactcagatgggctctgagaccgagcccagctctagaactcagatgggctctgagaccgagcccagctctaaaactcagatgggctctgagaccatgcccagctctagaactcagatgggctctgagaccgagcccagctctagaactcagatgggctctgagaccgagcccagctctagaactcagatgggctctgagaccatgcccagctctagaactcagatgggctccgagaccaagcccagctctagaacccagatgagctctgagaccatgcccagctctagaactcagatgagctctgagacagagcccagtattgagaccaagccctgttctagagtccaggccagctccgagaccaagcccagctctagaacccagataagctctgaaaccaagcccagcatagagaccaagccgtgttctagaattcaggccacatctgaagccaagcccagctctagaactcaggtcagccctgagaccaagcccagctctagaacccagataagctctgaaaccaatcccagcattgagaccaagccctgttctagaactcaggccacctctgaggccaaacccagctctagaacccagataagatctgagaccaagccctgctctgaagcccaggccagctctgagacgaagcacatctctagaatccagctgagccctgacaacaagccaaactctggaacccagacacattttaagacccagaccagcttggagaccaatcccagttccagaatccaggctagctcggagaccaagccctgctggaaaactcaagctgactctggaactctggacagctccacgatgcagccacacctggacactcggtctagctccggaaccccagttaattttggaacccatgtgagattcatgaagcagcccagctctggaaccccagtcagctcaggattcagagacagctcccaaatcaaatcctattcaagaactcagaccagctcagaaacccaggtccacacggctgcccagtccagatcccaaccccagttgcatccaagtgcccatccccatcctgcagcccagtccagctccagtgatgattccagctctgagactgagcccagctctagaacctcgcctagtgctacaaccaggcccaactccaggattcagaccagctctggaaccccatccatcttggaagcaagacccagctccagcacacagcttggtgccaagccccactctccttgcacaatgcagctcagctctagaatgcagtttacttccaggacccagaccaatttcaaggcctggccaagctccagagctcaatccagcccaagcaccgcacccagctctggaactcagctcagttctggagcacaggctggttctgaaatcccagccagctccaaaacacagacagcagctgagacccagccaagttccagaatccagctaagctctggagtccaatctagtcctgggacccaggccatcgcagcaatagaattaagctccacagccctgtctagttccgacagcaggtccagctccaggacccagcgctgcccaggagctcgaccagcctctgggactcaattcgcctctaaaaccctgccaggttctagataccagctccagaccacagccccagacagctctggtattcaactggactttgggaagcagagcagttctgaaagtcagcttagctttggaactcagcccagctctgggacccagataagctcaagaattcaagccagctctggaagtcagcttagttcgggaacccagctgatttccggagcccaacccagctccagaactcagactagttctggaaaccagctcagctccgggacccagaccactgcaagaattcagctcagccctggagctcatcttagctccagaacccagtccagtcctgagaccaggctcagctctgaggctcagtccagctctggaacccagttcagttctgggattcagtttggctctgaaacccagaccggctcaagaattcagcccgactctggagcccaacttagttccagaacccagtccagctctgagaccgggctcagctctgaaacccagaccggctcaagaattcagcccagccctggagcccaccttagttctggaacccagcctgtttctggaacccaatccagttccagaactcacaccagttcaagaatctggctgagccctggaaatggaatctgcccacagacccctggccttgaccctagaatccagcttgaggcccctgccccagcccaacctcagcccccaggcccatcccccagagaccccaccccagcccctagcaaagacccccagcctctgcctcagccccatgatcaggtatgtggcatccaggccagccttggccccatcccaggcttaccccaagcctcctacctggccccacagtcacaggtctcctcaaccccccagaagccagccgtctctcccaagccccgggtgggaccccagaagtccaccccacccaccatatctgtcactcctagtcctgcccctagggcagccctcctgagttcccagctgtctgagtccccagctttggcgccagccctttgccccactctgggggagccaggagcccgcccttaccgcggggggccgtagcttggctgtgacttagccctggttcatgtggttctcgtcctctcctgtcccttccagcctggggcccccagaagcagcaagtgaccttatttctccagcaggcggtggtagggagtgtgcggtggtgaaaacaggggcttcaccggtcctggctcagatccaggtccttggagggaaaaggagggcaggagacgggttgcaccgcatgtaccctgagggctcatggtgaataaaggcaccttccatctctgcagcctggtgtgtcattttgggggaagtttgggggaatgcagagatgtggggctggggggctggctgaaactgtggcaacactgaatacctcttgagcacctactgtgtaccaggcacttcattaagcaccgcacaggcatgagcttacgtgcctgcaggcgacaggtgctccacgaagacccagccactggtcctttctaccaatatttattgagcacgtactatgtgcaaggtgctgtacagaacactgtggtgtttgaaaggttgctgggtgaacaagtgaacagtggaggaaacgggcatcactccacgcttttgcatctctctctctctttctctgttttatttatttacttatttacagatggagtcttactctgtcgcccaggctggagtgcagtggcatgatctcggctcactgcaacctctgcctcctgggttcaaccaattctcctgcctcagccttctgagtagctggcattacaggcgcccgccaccatgcctggctaattttttgtttgtttgtttgtttgtttgtttgttttttgagacagagttttgctcttgttgcccaggctggagtgcaatgacgtgatctcggctcactgcaacctccacctcccgggttcaagctattctcttgcttcagcctcccgcgtagctgggattacagacatgcgccaccacgcccggctaatttttttgtgtatttttagtagagacggggtttctccatgttggtcaggctggtctctaactcccgacctcaggtgatctgcccgtctcgacctcccaaagtgctgagactacaggcgtgagccaccgcgccctgcaatttttgtatttttagtagagacaggggttcaccatgttggccaggctggtctcgaacttctggcctcaagtgaccctcccgcttcggcctcccaaaatgctgggattacaggcatgaacaatcgcgcccggcccatttatatctacttttaatgacacacagattcaaaggtggtttgattgcaggttccagggctaacctgtagccctcccattacaggctgctggaagaattctaggtggtaccacccatcaagtgattaggaaacactcaagaaacaaggtgggggaggaaccgaatcctctatgtccctccccatccttcccagccctgccctcgtctgctccgggtgaggcccaatgcacaaactccagagattgaaaacttctggacccaaaggaaaataaaaccaaaggcagagatatattttggcaagaaaagggggtgcccccgttcacattcaatcctttctggacagagccttccctgttggaggttcaaaaggaagcaactgtaccccagcaagtaggtcaaattcagggtcaaagagcatgcaaggccgggcgcagtggcttacgcctgtaatcccagctgctcgggaggctgaggcacgagaatcgcttgaacccgggaggcggaggttgcagtgagccgagatcgtgccactgtactccaggctgggccacagagtgagactccgtctaaaaaaaaaaaaaaaaatggccaggtgtggtggttcatgcctgtgatcccagcactttgggaggctgaggctggtgaatcacctgaggtcaggagttcaagaccagcctggccaacacggtgaaaccccgtctctactaaaaatacaaaaattagccgggcgtggtggcgcgcgcctatagtcccagctactcaggaggctgaggcaggagaatcgcttgaacccgggaggtggaggttgcagtgagctgagattgcgccactgcactccagcctgggggacagagcaagactccgtctaaaaaaaaaaatagcaatgcaagaccctcttccaatgtctgcatgcccttcctggggttgggagggacgcagagaaggggtgggagctctggatgggaaaaaggggccgaggaagggagagtgcttggtaaaaggatcagggaggagttgggggtccccgggttggattggggtcaacccaaaaccctgctgctgatgcccactgtccatccagcacccccagcccctgaatcctcagaacaggcagatgggctgtccgaggggccaagggctccgcggaaaggcgcgggaggggcgctctgtccacttcctactgcagcccggagcgctgcgtgagctggggctggagggacagcgacctgggccgggtgctgaggcgaggctggagacgccggagcacggcgcggcggaacaggatatacacccaggggtccaggatctggttccaggtggccacgcgcaagtagatgagcagctccttctccgtggtgcgggacagctgcccggcggggctcatggcaggcgggtttcgcagcactgtctgggcgatgaagacctgcaaaggggagagctgtcagcctgggcccccgcctccagccccgcccgccccggtccctgcccggggtcccttgagatccagggtccactccgttttttaattttatttttgagacagggtctcactctgtcgtccaggctggagtgcagtggtgcgatctcagctcattgcaacctctgcctcccgggttcaagcaattctcctccctcagccttccaagtagctgggattacaggtggctgccaccacacctggctaatttttgtatttttcgtagagatgggggtttcaccatgttggccaggctggtctcgaactcctgacctcaggtgatccaccagcctcagcctcccagagtgctggaattacaggagtgagccactgcgcccggccagtgtccactctgttactgcattgctgggtgacctcaggagagttgactaaccgctctgagctccttttgatgggttcataaattagcgcactcttagccaggcagtggctcacgcctgtgatctcagcactttgggaggtaaataggagagaatcacttgagcccaggagttcaagaccagcctggggaacatagtgagacctcatgtctacaaaaagttaaaataaatagaaaagttacccaggcatggttgcactccagcctgggtgacagagcaagatcctgtctcaaaataaataaataaataccttttttttttttttgagacggagtctccgcctcctgggtttacgccattctcctgcctcagcctcccgagtagctgggactacaggcgcccaccaccacatccggctaattttttgtatttttagtagagacagggtttcactgtgtcagccaggatggtctcgatctcctgaccttgtgatctgccctcctcggcctcccaaagtgctgggattacaggtgtgagccaccacacctggccataaataaaatatttaaataataaaaattatatttatctataggtcaggattgatgggaaatttttttttttttttgagacggagtttcactcttgttgcccaggctggagtgaaatggcaggttctcggcttaccacaacctccgcctcctgggttcaagcgattctcctgcctcagcctcccgagtagctgggattacaggcatgcaccaccacatctggctgatttttttgtatttttagtagagacggggtttctccatgttggtcaggctagccttgaactcccgacctgaggtgatccacccgccttagcttcccaaagtgctgggattacaggcatgagccaccgcgcctggcaggaaatttttaaactatatttaaaaatatttaaaataagaatgttatctacaaattagtatataatatataataatcaattatatgataattattcataattataatgtggcctataattgatatatatcatatatcatacaattatattataattaaatgttacattatattaaaatactttgtttgagatcagcctgaccaacatggtcaaacaccatctctactaaaacatacaaaattagccgggtgtggtggtgcacacctgtagtcccagctactccggaggctgaagtgggaggatcccttgaacccaggaggcagaggttgcagtgagctaaaattgtgccactgcactccagcctgggtgacacatcgaaactccatcttaaaataaaataaaataatttggccgggtgcggtggctcacacctatactcccagcactttgggaggctgaagcgggcagatcacgaggtcaggagattgagaccatcctggctaacacgatgaaaccccgtctctactaaaaatacaaaaaaaattagccgggcatggtggcgggcgcctgtaatcccagctactcgggaggctgaggcaggtgaatcgcttgaacctgggaggcggagcttgcagtgagctgagatcgcaccactgcactccagcccgggcaacagtgcgagactccatctctaaataaattaaatcaatcaatcaatcaaatcatttcctgagcagtaggtcctgtaggctgaatgaagcagcaacagcagctgaggaactcccagggcgcaccctcataggctcacagtccagtcgggagacggaaactgggtccggggagttacagcatggggtgggcaaagctgtgaggaggaagcaatgtcagagcccagaagaggtgcctgacctggcctagggaagtcactgaagggcaaatgggagtgggcaaggtgcgtctgcaggaagtgcctgtgagaactttcttctgagggcaacagggagccatgggagggtttagagcaagggttgacccatgggccaaatctggcctgccacttgctttgggttttttttcttttcttttctttctttctttcttttcttttcttttttttttttttttttgagacagagtcttgctctgtcacccaggctggagtgcagtggcacaatcttggctcactgcaacctccacctcctgggctcaagcaattctcatgcctcagcctcctgagtagctgggactacaggagtgtgccatcatggttagttaattttttttagttttagtagagatggggtttcaacatgtaggccaggctggtcttgaactcctgacctcaggtgatccgcctgtctcggcctctcaaagcgctgggattacagacatgagccaccgtggctggcctgtttttgtttgtttgtttgtttttgtttttgtttgaggcggagtctcgctctgtcacccaggctggagtgcagtgacgtgatctcggctcactgcaacttccgcctcctgggttcaagcgattctcttgcctcagcctcccaagtagctgggactacaggcgtgcgccaccacgcccggctaattttttgtatttttagtagagacggggtttcaccatgttggccagcatggtctccatctcttgacctcatgatctgcccgcctctgcctcacaaagtgctgggatttcaggcatgagccactacgcccggcctgttttgttttttactaagaatttctttccatgtttaaatggttagaggaaaacaaaatagaggcaaaaattgagtgacataaaaatgacatgaaattcaaatttcatcatctatccatcagtagttttattggccacagccacgcctactcatttatgtgttttctacggctgctttctattttttttctttttttttaatttggaggcagggtctcactctgtcacctaggctggagtgcagtggtgcaatcatagctcactgcagcctcaacctcccaggctccagcaatcctcctgccttgacctctcaaagtgctgggattgcaggcacatgccaccatgtctggctaatttttttattttttatttttttttttgagacggagtctcgctctgtcgcccaggctggagtgcagtggcgcaatctctgctcactgcaagctccgcctcctgggttcatgccattctcctgcctcagcctccagagtagctgggactacaggtgcctgccaccacgcctggctaatttttttgcatttttagtagagacagtgtttcaccgtgttggccagaatggtctcgatctcctgacctcatgatccgcccgcctcggcctcccaaagtgctgggattacaggcgtgagccaccacgcctggccttaatttttgtatttttagtagagacagggtttcaccatgttggccaggctggtctcggactcctggcctcaagcgatcctcccgcctcagcctcccagagttctgggattaccggcgtgagccaccgcgcccggtcccaccatcaggatctaaatccaccctgggtgaccagaggtccagtcaggagggtagcaggaccccgcagagcccctactcaccagaaggggcagccaacacacgctggccaccaccatgatccccaggagctgagccatcatctccacctcggagtcccggggacgctgctgggccgcctcctgcccgtggtagacgtggcacagggtggccacgctgaccgtgttcagcaggaaggacagcccgaccgagaggccgcccagcatggagaagagcagcccgaaggccacgtccccggactcggcgcccagcgtcaggaagcaccaggaccccgggtattgcacggtgtagcgacccacgcccagcaggggcagcaggcccagcgccagcgcggccgcccacaccagccccacggtggcccaggcgcggcgctgcgaggcgaccgccgggcgcgagaagggccgggtgatacccaggtagcgctctgaggccatggcggcccccagcagcagcggggacaggccgaagaagatcatgacgacgcccatgaagcgacagagacggcagccagggtccacggcgtgccactcgaagagcgcggcgtgctgggacaccacgatggtaccggtcaccagcagccccaggaagtcggtgaggacgaggccgcagaggaaggtgaggaaggaggagcgcgtgtgcgaacccccctgccgcgcgcccgccagcacgctcagggccagcaggttggaggccaggcccaccacgcagaaggaggcggcgaaccagggcgaggcgatcagccgtctctcctccagggtaatgtttgtgggccggaaacagggccccagggaactgccgttgggccacatggctccggagccctgagggatcagtcaccaccccatcaggccgatgctgcagacagggcaggctggcactggttcaggcacacctgggaggcgagagaagatttgcttgtgattaattctgcatttcagtgtaagtagctctggtgaactcctacacaaccttcaatgccccagctcaaatatcctctccggttttttttttttttttttttgagacagagtcttgctctgtcacccaggctggagtgcagtgatgcaatcaaggctcactgcagcctcgaccttctggacccaagtgatccccccatctcagcctcccaaatagctgggactacaggcacataccctgtagtaagtagtcctcccgcctcggcctcccaaagtgctgggattacaggcgtgagccaccgtgcccggccttttcctccattttcatggtgtcggttttataataagaaataaaccctgaaatccagttctattttgggaacaaaaaacacttcttcggaatggcaggttccccagggatggttggtagagagcagcaggcggggacctgttactctgtgtggggctaacgctcagccacaatgcacaacaaaatcggagccaagccaggcgcagtggctcacgcctcttatcccagcactttgggaggccaaagtgggcggatcacttgaggtcaggagttcaagaccatcctggccaacatagcgagaccctatctcttaaaatatatatatatctgggtgtagtggtatgcacctgtaatccctgctacttgggaggctgaggttggaggattgcttgagccccagatgttgaggctgcagtgagctacaattgtgccactgcactccggcctgggcaacagtgagaccctgtctcaaaaaaaaaaaaaccaaccaaccaacaaacaaaaacgctaaaaaccccaaaaaacaaaaaaatggggccaggtgtgatgagtgaagtaaaaataaaatgagatggttcaaaaaccagcttctggctgggtgcagtggctaatgcctgtaatcccagcactttgggaggttgaggtgggtggatcatctgaggtcaggagttcgaaaccagcctagccaacatggtgaaaccccatcttcactaaaaatacaaaaagtagccaggcatggtggcgggcgcctgtaatcccagctactcaagagactgaggcagaagaaatgcttgaacccgggaggcagaggttgcagtgagccgagatcgcactactgcactccagcctggacaacagagcgagactccatctcaagaaaacaaaacggccaggtgcggtggctcacgcctgtaatcccagcactttgggaggccgaggcgggcggatcacgaggtcaggagatcgagaccatcctggctaacacagtgaaaccctgtctctactaaaaatacaaaaaattagccgggcgtggtggcgggagcctgtagtcccagctactcgggaggctgaggcaggagaatagcgtgaacctgggaggaggagcttgcagtgagctgagatcgtgccactgcactgcagcctgggtgacagagcgagactccgtctaaaaaacaaaacaaaacaaaaccagctccccataccccatgggtcatgtcaaagtccagagggttgtggctggttgtaaagtcacccaggaggctaggatggaacccgggtctcctgcctcttgccctgacacacccccaagtcacctggagggactgggtgggcaaaggtgggcgaatgggactgtgtgcgagatggaggtgccaggcagttaaggctcaaaaggtcctattacggtcaggcgtggtggctcacgcctgtaatcccagcactttgggaagccaaggagggcggatcacctgaagtcaggagtttgagaccagccggaccaacatggtgaaaccgcatctcaactaataaaaatacaaaaattagccgggtgtggtggtgcatacctgtaatcccagctactcgggaggctgaggcaggagaatcgcttgaacccgacaggggaagtgatgtttgtgggccggaaacagggccccagagccaagatcgtgccactgaaccaacctgagcaacaagagcaaaactccgtctcaaaaaaaaaaaaaaaagaaaaagaaaagaaaagagggaggcccaggtgggcggatcacgaggtcaggagatcgagaccatcctggctaacacggtgaaaccccgtctctactaaaaatacaaaaaattagccaggcgtggtggcgggcgcccgtagtcccagctacttgggaggctgaggcaggagaatggtgtgaacccgggaggtggagcttgcagtgagctgagatcgcgccactgccctccagcctgggcgacagagcgagactccatctcaaaaaaaaaaaaaaagtcggggttgctgatgacgggagtgaagggatccacgcgcagcactcagcacagcacagcgggcactcaatgcatgctggccctgaggcagggcctgggctgtggggtcgcagcagctaacgcattccagggcggtcaaatgggtgactgtggccctcactccccatctcacttgtgacgctttggcctggcttctggccttggctacgctgtatccagcctcataaattatccagctcctgacagcggcactgaactcccttcctgggaagacagctaaggccactgccaccgtggtgggaggcagggcttccagaggagaaactgaggcctggagagcagatgcggtggggggttcctcgcggcctctggcgatcgttgccctccactccgggctgctttggcgcctggggtttggattcctgcactgggatttcccctgggacaaggcgttcctccctcgagagctggtatgtgctgtttctggacattccttgggactcggctgtccctgcggccactgacccgacctctgcctggagcaacttccagtccctcctgggtctcagggtctcctcgaccacactccactccactcaccgggggtcacacacccggaactccctcacacctccggtggctgggagcaaatgcatggcccagagcccttggcccaggggagcctggaaactggcactgagtccttctggccacagctggctgtttccaatccccccacctccactccccaccctggcttcaggcgatggcagccatctcaagttctccaggcaaggatgccaatggggggaccgggcagggcctcccttccctcctgcattggccaggaggggtagcaggggcccccacgcggtggggcagtagagcagcactgcggctcttgggaaaattactgtccctccctgtgtctggggagaggtgtggacccaagatcgcttttcgatgttgaataactccagaattttgcagtctgagagcagacgtttgccctcagcgggttcagggttgtggaattctaacacgcttccagtcctgggacgcagaaggcctcacaattctagaatcccaagaggctgaggtcctgcaactcccaagaggctgaggtcctgcaactttgatgggaatctgcctgggtcccgggttccagaaatctctgtcttaattcctggcttctttctggaaggcggacagtgagttctccctcatccgatgccacccctgacagggtatccggcttgcaggtcgtgtgactcggagggctctgtccggcgctgtttccagaggcccgggcgctgggctgggcgtgggcaccaggcctggctgccccaagcctggttgccagtggaatgtgatccttggttcccaaacagcaggcctctcctccgccccatgttccatcctcgtgccccctcccccactccctggagcacgtcacctcatcatccatccatttctcaacaagtcccctctcctcagcaccccaccctgcccgccccgcctgcctgtcacggcctgagcccaccccacctcccccagacaggcttggaggctctagtccctgatctgccgtggccaggctggggctccaccttgccgagcctcagtttccccgctctgtgcaatgggggtgagcttctgatctccatgcctgcgggtgctaagctcaggcctccctggctctcacctctgcagggctcctggctgtactcacagctcaactccctacaaggtgcccgggcagccagcagggagccctgaggctccgtgtcacccctgtcggccttggaccttggacccacagggcccttttgggactgaaacttcagggaccggccagaccctcccatgcctgctgtagatctgaacgctcatgggcgtggacccccacatggtagcggaggcagacacactccacaccctgatgggcccacctcccctcatcgcaaagctccatttccgagaacatttcctgtttgtgacaccaacagggtccccagcccacacagtgcagggcggggactcccccagccagccagactccggccagccttgttggggccctaagtcacatggccccctgtgagcctcgctttccccatctctctagtgggggctccccagggagcatgtacggagctccgtcacacaggggccagcagggaccagggggcgggacccgggaggtgcagctggtggttaatggtggaccacaagttacagtgattccaccaacatgcacctcaggccaccaccgtgtgtgcacactcgagacacacagacacagccagacacacacaggcagaaacacagcagacacacaggcagaaatgtgacagacagaaacacagcaggcagacgcacagacgtgcacagacacacacacagaaacatggcagacacacagacacacacacagatagaaacatgacagacacacaggcagaaatgtgacagaaacacagcagacagatgcacagacatgcacagacacacatacagaaacatggcagatacacagacacacacagatagacacacacagaaacaccacagacacacccagacagaaacatgacagacacacaggcagaaatgtgacagacagaaacacagtagacagacgcacaggcatgcacagacacacatacagaaacatggcaaatacatagacacatacagatagacacacacagatggaaacatgacagacacagacacacacaagcagaaacacaacagacacacagacacacgcagatagacacacacaagcagaaacacaacagacacacagccacacacagacacatacaggcagaaacacgacagacatagacacacacagatacacacataggcacacaggcagaaatgtgacagacacagacagaaaaacacagacacacaggcagaaacacaacaggtacatagatacagacagacacagaaagacacacagaagaacacacagtatttaacagtcacagactctcggcagaaacaaacacacggtcacacacacaaaaccaccacacacgcacagacacagacacacaaccagggccatgcatggttcactcccagagacaagatcacacacacagccgcacaaccacactcgatccctgccacacccagggcctgggccccctccccggctgcagccccctgagtctgggacccccattcacagccatgtggccccacagagaccagagagccccccggacagaatcagcctgggccgcacccagacccagccgcctgggcgcccagggcaggcctcagggcaccatgccacccgccgggccacacaggggacacctggcacctggccgctgtcaccgcgggctttgcgacacacccacagcagggcagggccagcgccggatgcgcccagcagcccgggctcacaccagagcagtgcatcccgccctaagccagcggggcgacctcaccttcagagacctcatctgcggggctcccacctggctggatcccgcgcccgggggtccgggcgccgtctggagctgagcaggcagatgtgcgggcgccgagggtggggcgagggctgggggcgggcagagggaggggaaggacgggctcgagcgggacctcccagggaaactgagtcagtctggctgtgaccaggggcgggcccagcagaggacccacacagatggagggcgtggcggcacaggacgccctggggtcgcggcctggaggggtccgcgggggctaagccgagctgggacgggtgggggccgctggcagcccgcggctcgctctctccgtccagtctctgtctcccgctgtctctcatcagccccgcccaccctgcgctggccacgcccctcgggcccgggcctggctgacttggagtcagtgggtgccccccgcacgccgggacaccctacagccttctggggaaggcggcgcccttgggacccccaggccaccggtggcagggatgcaatggcccgcgtaggggtggcaggggcgcttcctcgggagcctcagcccctccagccgcccagcgccctgccaggcctcttcccggcgctcccgccgccaggcccgcattattcaccatctgggcagcacccaaggcctggagggggcggggcaggtccaggcggatcggctcccgggggtcgcccagactccagggctccaaattcactgggtgcgctggaacgcggcacacagtagtagtatgccctgcttaatacatacaggacatatttgaggccccttccaggggtggggtgggaggacagagggatggggggtgcaccagacgacacagccagactgagaaaggtggtcccagagcaggtgagccgggagggctggggtgatggcatcgcatgggagggtctcttgaggaggctcggaggtggctttggagccagaggaggaacagtctggagccgggaggctgcagtgggggatgggcactctttcctggccaccccccagctcgggctggggaaggagggatggagcccaacaggaatggctgagaaggtgccggacgcagggactgggaccgtctctttgcagaggggggaccttgggcttccttggccttgtttgtacacccgagccggacagaaccttgagttagggacctggagtgggaccggacaagctgaccttgccctgactgcaccccaccccgtcccctgggcccgggagggctgctagtccaggctgtgagtgaggggtattcccagcctggcccggccctctcgtcagcccagtccggaagccccttccccggctaccccgcccactatccttcctcctcctggccttcggccacacccaacctccctcccaaagctctatcccattaagtcaccagccatttaacacaacttctctctttcctggcaaggaggctatccaactcctatggatgtggcaaaaccctggctccaaggctgctttcccgtgaagccgacctaatctccaagtcttactctccccaacccctctctgtgttcagcttatacagtgggacaattatgagctccaagtgagacctgaaaccaggcctgcccttcaggatgccctaggctggagaatgaactggacacaggctgttccagccccctggggtcagggctgggccaaaggaagagacagggcctagggaagcccagaggtgagctaggaagacatcttgtgaggagagggcatgggaagtggggttttgtaggatgaataggagctccccaggtctgggctacgtggcagtgacaggaattgcatgtataaagctttggaggcaagagagagcatgaggcccttgctacactaactgcaaggagggcagatgttgggggaggaggatgtggggctggggctccagatgagggggcagtgagagacggaggaaggctgtcctgtccccacttcctctgtcctcggccctgagataacaaggacaatgactcttctgggaaacagcctgggcagagttcagagaaggacacttgcatttagcttaagcctcaccacatctctgcaaggcagggggtaaagatactcttaaattttagagatggggaaactgaggcacaaagggggaacaatgccacgcccatgtgtgggattggaacatgagcactgggcttccctgtcatctggggctggttgctggtctcccggtcttggcccgccccccgccccccaccccccgccagcacttcgggttcaatgggagcacaggaggctctggtgggaggagttgtgaggggctggggggcagatggtgggaacagaggccaggctcaggatgtacccccgtggctgcggtttccggcgggggccgggcagggagcgtctattcttagctctggacacagccaaagtcaggaagctgggtgggggcgggggcagcttccaggacaccaggtggacctcgggccatggtggagagtcatggggtagatgggggggtggtgtgcagagcctacccctggcccccacctccagtctgcctgcagggtctcgacacccagctcggaggccctccccagctcacgcgccctccgtagctccctggtgcccagctcccctaggatctggctccttagcttggcctgagccctgtgtgccccctgccctgggcacacctgctgccctgtcctctgcaaggcagccgtcacccttctcggccagcagcccgtcttcccaggctcagtgcccgtgacccttcaggggtcccagggccccagctctgctccctccagactggggcccctggcaaaccatgtgtcttgccagttggaggacagccatctcccttggggtgcaaaaggaacgtgaggaggaggaagcaggatgctggggctgggggaatctctgcaggggcaggtggggaaactgaggcagggacggggtggtggtctgggattgggattctccagggtagagaaacccagcttctaatactggccctgccactttctgggctcaacaacgtgggcttttgtgagcctcagtttcccgagcagccaaatggaagtaaatactgtcacatagagctggtgggaggtctgggttaggcccagtacaggctgggctgcgccagccacgcacacacaacctgggctgtgactacagaacccggcctgtcccaaacaccactctgggctcaaaagtgccttctggtgttgaggatgtagaaagctgtgatcacgcccactgcactccagcctgtctcaaaaaaataaaaagtgccccccgagtccagcccggactcagccctgccccagcagcctgtcctgatcggcggtggagctggccaggaacccaggcaagaggctgcccagaggattctaagatggctctggccatctgccatcaacttgtgatgtctgctgaaggctgggctggggatggcagtgttgtgtgtgctgcaatgcgatttgggattctggagtaggctggtcagggtgggccagggtctgcggtgtggagagcggacgctgatcagatgcacttccctggccagttcccaagccctgtgccacagacttccgggatcctgttagaggtgggggctgggaggtgaccagtgccccaggggagtgcaggatctgccttgcacctctgcctactgcagtgaggacatttggggaggctcatcctgggcactgaagcacattgggcagcatccctggcctccactcactccacgccaggagcagccccaaggtgggaccaccacgaatgcccccaggcatggccaagcgctgcccccatgagagcctgggcccaggccagcagctgtgtccacccttgtaccctccctcctgtcgtctgggaaatggactgtcacccccactgtgggaggcaaggcagaggggtggggggcaaagacagatccgggcactaacacagctcccaagggaccaccgggccccagttgggtgccgtgttgtttcccaggctcttcccttgggacaaatgcgctgtgtcacaaatgccagcagcaactagggcagcgggtgtggggcgtcggacacgttacactctctgcatttctgcaaacctaagattattctaaaatacaacgtttattaaaaaaacatgcgatcttgccaataggccaattccatgagaacaaaagattttttttcccacctacaagtctttttagagaaacaaacggaactatttccagatgaggcggggtgtctgggaggggctgtgggtggtctggggctggtgactggtgaggttgggtggccctctgggggtccgggaggcactttccgttttgcttctgttggagatgttcccgtcggatgctgaagaacaagcctgccggctgggccactccgacctgggctgtggcacccgtgtggccctcggccctcctggcctgagaaaggggagtgagaaggagccactgtcctgatatgggcaaaactcggggtcactggtctcatgctccaaggccccgtgagcaggccaggtggggggatccctgggggaagcccctcacccttctccaacccccagccttcggggagcccctgccctccaggccctgtgctcagaggtggggggaggacggctcagtgacttttggttcccacgaccttgacagagacagggacctcgacgcatcctccatacccgctgcggggaaatggaccccaccagccagcacggggtgagttgggggccagtccctgcagagtgtgggtgtccacagagggtctcttctgcagtggcggatcgggcgccagcagggtcccggcctcagtgctgcctgtgcgggcgagggtggcctgtgggcagggctggagctgccccacagccgcgggctctgcctcacgcccagtgggtgccccgtgatgtggcagggctggccttgagtttcctgcttctcacgagcctggcaccgccaagcccaggcccctctggcccatctccacaacaccctgtgtggccgccacttggggcaggccctgtgggccccacccagcctggctgaggggcggtggagagtgtccgcctggacggtgaggtcagctggcggctgctggccaccctcgtgctcgaaagatgcccctagcgccccctccgttgcatcaggaccctaggccagcctgtcccagtgtctcctcagctcaccatggcaggctcaatggtgaccccccttttatataggaggaaactgaggcctggcgaaagaaagatgcggcctgaggtgggacgtgaacccgcggccctgcagcccagacagcggccccggagtgaccaccagcttcaccgaagcccctttactgtgcccccgaggacacctgcctgccgttccccagggccgtcaccgccgatagcggtagcgcttgaagtgaaaccacagctggaagatgccgttggcaaactggcagcggaagccgtggcggtgcgagtattcccactcgcggttgacgatcttgaaagcgatgtcctcgtagggcggccccgcgtggaagcgcaggatggcgaaatccttgttgtcggcgcaggcctccaggaagtactcgggcgtggagcgcttgtcgatgaggtcggggtagaagatgttgaacttgtatccctgcacgatcttgggcggtgggttgtcaaagtcgtagtgcgtctggttgtacttgttccactcgaagcccgtgtgcacgcggttgaagaagcgcggcttgcgtggccggtacttgtcggcccacaggtaggccttgccggtgagtggcatctccacgctgaactgcgcctcgtcctggcccatgccctccttggcccgccggaagaagatgtcctcggcgctctcgctggcgtctcctgcgggcgggacggcgttcacccgggcctcggcctccccctgggtcctggcctccctcctagcctctctggcaggggcggccgctggtgcctcccgcaaaaggaaaacaggctggggcgagctaaggcacatggggaggggacagggcctgggcgacccggagacccacaccatccgccccgagccccggaccttggtcttcatgtctatcgtcctcctgggtggggaccaagcgcagcgcgcttccccgccgagcgacaggagaacctggtggttagggcctggctgcgggatccagccccacgcatgacccccgagggggtcctggcccaggggttttctgaagccagtattttctcctctgtcttaggacggaggctgcccagggagtgctcggacagcggccggtaaaagcttccaccacctgtggccccaaggccagtgggccagcaagcccaggatgaatgaaggaacgccccagtgcgcgtgcaggtgacggaatgcacgctcagagacccgggggagaagcagcaagcagctccccactgacgccagcggcttcggccgggaaatgaggctggagaagccccgcccccagctcgccccactggccccaccccctggcctccagccccgcccttacccgtgacctggagctgctggcgcgagagctgcaggcgctgcaggtcctcatccggttccagcacgtgcgcgtccagtggcagctcgtgcgccgtgagcagccgcgggctgtacctgccggcgtcgtagtcgtccaggctctgctggatcaggtcctcctccatgagcaccgcctcgccctcgccctcgccctcaccgtccccgtcgccgtcgccctctgtcggggtcgcgccgtccacctcggcctccgcggggccgccctccgaggagggcccgggcggggtgggcgccgcgtcctcaggctccaggctgggaggagagagcgttggaggcgcggaggctgcccacggcccctccatcctgctccgcgtctgcatcggcgtccccggggtgccggccgggcctacctgcggctgggggactggggctcctgcttgaggatggggaacagcggctcgctctccacgccctgctcctgcttcagtttgtacagcttctgccgcagcacgtcctggtggcgctcacgcagcctgggacgcagagccggggtcacccgcatggaggcgaaggggctccgcgccccacccccaccgagattctcacgccccttattgctgcaaggaccctgagaaggtggcgagcagccacggctctggctgggacctttgcccaggcttggtcagttcagggtcaaggcttatgggagagaggacgagaggacgcaggtaccctggtgaaccatcccatggcagggagaggtgggtctctgtctcacgctgcagtctcagtgtcttgtggctggggctggccaggagaaggggcccagcaggacaccagccaacaagcatgataaatttagagacatttacaaattagcagaggagacatgtatttacacagcggtgccaaaaacactccagaaatctgtacacagccagaggccgggaggcagcagcgctgggagggcgcaggcctgggcgcaaggcagtggggacaggcaggccgcctgggggcttcctgtgatgccatggctgctggagcgcgccaggtactcgttaaagggcggaagctcctggggagccctgtgagaccaacagggctgactccaggtgagggcactggagcatcctggggccttcccgctagggcacgggactacgcgccccccggccccccttcgtcactcacaggctggccccggccagtcggcactttcctgcccctctccaccccacatggtcccaggaggaggcgagacccaccccacccaggactcaggagggggcgaaacccatcccacccggacggcaccaaccctggtacccgcacctagtgctcaccgggcccgtgccatgtgggcacgaagctgctgcaggaggctctcccagtagcccatgtccaggttggggccaccagcgcggattttgccctcgatgccctggaagatgacctgcagctggttgtatgtcttccccttgaacaccgactgcacatcagagctgacggaggcgttgaccccctcgcggcgctcacctgcagcggggtgggggcatgggggggcggttccacatttcctacgtgctcctccaccccatcagggcctcctcccctgccatgggggggtccccctcccctcctcttcccccacaggggtcccatccagtcccgccacctccctggtctcaggttgtccccaccctggccacagcggaggggagggggtgggcggaggttgggagccacgttaagatgcagttgctgaggccttgacctggaggcccaggcccccagcgtgggggaggccaggactggccctgagaatgcccctccccaggtgagtctgatatgtgggtctgggaaccctagttgtgggcccggcccaccaacctggcccaactctgccctggccttgggcagtccatgagggggttggggggtgtgctcggtagccaggctctctggaattcagatcttctctgccagcctgggctgtgtgactgtgggcaagtggcctgccctttctgggccttagtttccctctgtgaagcctagcaaagaaggccaccctgctggcccctggggaagtcctgggcccgccccaggacaaacagctccccaccgccgccccccatcctacatggagtctgtctggcatctaccactggcccaggggcccgaggctcaagtccctcctcgatagacggggaggctgctgagggcgggagtggggtgctgggaggctggagcctagcctgactccgcgtgctctgccccacaccacgtggcatcccggcggcctcagtgctgctctcaggccacttccacccaccccgctgggtctggcctcacctcgcaaccctgccccttgctgcccatgccgaacccctgccacctctgggcctttgcacgcactgtgcttcctgccagctacccatccttctctgtcccattcgcttcctgaattcctcgcatcctccatgctcagtgagaacatcccttccgccaggaagccctccctgaccatccagcgatggcagcttcccgaggcgggcaatggggctggctgctgctgttccctgtgccatgctgggcccacagggagcttggtgcatagctgctggtgacacactgggcgggggtgaccagtgcaggcaccctgctcgagacctgccttctccagtccccgctggcggacagagggtcaagaggcccacacctacaccacaggggactggatagagtctagacggacccgagtcccctccagccaatcacctgggaccctggaatcggcacccagagctgcagcccctttgctgggcgctaagtggcactggaatccgtggcagccccagccaagcacagcgcggccgtgcccagacaggcggggctaccacgaacactgaaacccaagcagaagagcccagccgcgaggctcccaggaagccaggccaggtgccgccaggtcagcgtctatagaaagccgggtctggacatgctgctgcatgtctggatgcctcccgaatgcccacaagggggcccgggggtttagggggtcccagcagctgctagaggctgggggtgcaggccaagggccctggggctgcgtgggggaaaggccaggccctacacagggtgggaggctaatgaagctgagctgggatgacacccgttttctactgcacaacctcctgtagggttagaacttcctagaaaaagctaggtgcaccaaaatctcacaagtcaccactaaagaacttattcatgtaaacggccgggcacgatggctcacgcctgtaatcccagcacttttggaggctgaggtgggtggatcacgaggtcaggagatcaagaccatcttggccaacatcgtgaaaccctgtctctactaaaatacaaaaaattagccaggtgtggtggtaggtgcctgtaatcccagctacttgggaggctgaggcaggggaattgcttgaacccaggaggcagaggttgcagtgacctgagaacacaccactgcactccagcctggcaagagagcaagacaccgtctcaaaaaacaaaaaaacttattcatgtaaccaaacaccacctgttccccaataacctacagaaataataaaaaaactttaattttgtaaaaattaaaaagaaaaagcatgcagtcactcatgcctttaatcctagcccttctggaggtgaggcaggaggattgcttgaggccaggagttcaagactagcctgggcaacacagtgagaccccatctctacaaaaaattttcagaagtggctgggcacagtggctcacttctgtaatcccagcactttgggaggctgaggtgggaggatcatgaggtcaagagattgagaccatcctggccaacatggtgaaaccctgtctccttaaaaatacaaaaattagctgggcgtgatggcgcgcgtctgtaatcccagctacttgggcagctgaggcaggagaatcgcttgaatctgggaggcagaggtcacagtgagcagagatcgcaccactgcactccagcctggtgacagagtgagactccttctcaaaaaataaaatagctgggtgtgatggtgagcgcctgtagtcccagcttctagggaggctgaggtgggaggatcacctgaacccaggaagtcgaggctacagtgagccttgatcgcgccactcaactctcgcctgggcgacagagcgagaccttgtctctgaaaaatgaaaagtaaaaggaaaaccccaattaatttaagaagatccaggacaggggctctgtgggtctccagggggacagcaaagtcaagacccctcggttccctactcctggaaaccatgttgaaaggagaatcagaaacaaactccctcggaagacaccaaagccacctggggtccccaactgtaacgcgtgaggggaaaggagggctgagcgacgtggtggaggcagaaggccatggaagggatgggagaggccggggcctagggcagtggggcacgctggaaacgcctcccaggcttataggagaggccgggcccagggcaacgctggaaacgcctcccagtcttacaggagagggcggggcctagggcaacgctggaaacgcctcccaggcttcctgcagccggtgggtagggtctgcggcttctgaaggaaaatgtactgcacccagaagtctttgcccagccccgctgccaccagcaggagcacaccaagacccttaacggacacacctctgatgctggagaactgccctgcctctctgaggttacgggagaatgtgccccacggaggagaccactggagggacaggatggctgagtgaactccacctccggggaacacaaagctccactgaaaaagaggaaagccacaggctctttcctaggaaggacctgccacagaccacgctgagggctgcaaatgacactgacccagcctcctgggatcctcggccaccatgatggcacccaaggcctgagagggagggcaggggaaggaccgggtctatcgacagggatgcgtggcccatgagagccaggcactgttacagcagccgctggggcgtggattttggcggggagggggcagggctgctgtggttggcttttagaccggggggggggggggtctcatctagggcaattctgcccccaggggactctgggcaacgtctggggacatctgcggttgtcaggactaggggtgctcctgaccctgggtggaggccagggacgttgctcagcacccagcagtgtccaggacggccccaccctagggaacggcccagcccgcatgtccgcagtgctcagggtagacgctttagagcatccccggtgaccatgtgtgtgcaaccacacggaggggggggaaacgtgattttaaaagcccatcaggttggaggggcacgaactgacgcacgggacaggtagcgccctgaagctgggctgcacggccttcaggccaggtggagcgagacttgctgtcaaacaggcagagccactgagagcactgaaacctgagcggaaagccccgtggctcccataaggccggcaccgccgagtcagcgttaacgggacgctgggtctggacgctgctggccctgcaccccagacagaggcccgccccactcatccctcccagggcctactgcccgctgctgccccctggtggctcggcccagaaggggaggccccagttggggaaaccgaggcctgcagagagcaccaggccccacagcaagtctgaggcttctgggtgaacactgtagcccccgcagctcccctggagcccaggcccatgcccgccgttacctggccccttgcccgaggcctccagcttgcggagcttggagatctcgtcctcggtgatggtggtcatgtcccgccagaagtcggcgttcttgccctgctccagctccatgtagacctgggggcagggggcaggggtcaggacacgggtgtggctggggtgggggtgagggtgcaggtcagaggagcatcgggtggggctgggtacctggatatcctccagcaggtcctccatgtcggccacggtgaggccgttgaggaacgtgtagggctcatgcatctccacggccagatcgtcatcctcagcgctgatgtacttggccagcaggtcgatgggcttggcccgcccgtcccggatgcggatcttggaactgtggggagcaggggaaggtggcatcagagcctgggctgtgccctccatgctaaagaccctgcccttggggtgaccacaccagtgggagccgaggaggggcctgacccgttgggggtggtcagggaaggcttcctggaggaggaggaggaggaggcataaggtagagtgagccgggtcagccaaagggcgcaggccagcagtgcagacaaagtgcaagcagcgtggacccggaggtgggccaggtgggaggggcttcctggagggcctctgggatgtgcccaggatggcggcttctatgtgggctgtgatggggaagagtggaggagctgaagcagaggcaggctgggggaccagagtagtcactgccttgcaaccacctcctcccccaggcagaccactcggggcagagagccgggtttctgttctgggcctgcaggggggtacgcgttgcaggcgggccctggtccaacccaagggaacccgtcaccagggaggcccgagctgggaggagcctgatgtcacccgccacggggcccaaggcaagcagggacaccccggagcctcagcttgtctgtaaaccaggcggatgggggtgccaccctcctgggtggagtgtgggagggacaactgcagtcagtgcaggactggcgtccagcatgcgtggggtgccgttcacctgggcccgtctcctctgcaccctgcccagcaggggagggcaggagacagaagccttgccgcccgggaaggggtcaggaagggaaggtcccaggaagtgccgtgtgggaccctgaagggtgggagagcagtggcttccagagtgacagccagtgcccggccctggctccaagtctgggtcggagggagggggaggccccagcgcaccgcagcttggcctgctggaggtggaagttgtcctcctgctcctcccatgtcttgaagtgctctgcctccttctcgcgctgcagcatctccagctcctgctcgcgcatggccttctcccgctcccgctccagccgcagctgcttcacctgcaggcacaggaggctgagggcagcggggaccgtgcggtctgcagggctgcggggggaggggctgtgatgatgggggcccagccttcacccagctgccctgggcacagggattggtccggagatgcctgggctggtggacagaccttgggaagggagagggccctcctgcccgagactcagcagctcagatcagctggggccctctcggccaccctgaagggagcatgtgggagtgaaggcccgaggccagcagagccgagaggtggagggaaacagtttcctggggccatggtctgagcccctggatccagccttacctgaagccagcccccaggacttcccacttaagcccctcaagtcctgccaaagggggcgggcctccaggccctggaaagggagggccctgcccagtgggctggcagggtgcctaccttctgcagctccagccggttgtcctcctggatcctcttgttccgctccttcagctccttctcctccaggtggctgatccccttcttctccagggcctggaagcaccaggcacacctgccctgagcacagacccgccccctcgcccccctcctcagctccttcgtccaagagattgaccagggcccttgttttgcagagagaggtgacctgccagcactgcacgtcttccaccccctccttaacactcctgaaacccagtgcatccaattcagtgcagacatggagcccccactgggagtgagatgtatgcaaagggtaagaaggggctaccccaactctcaacaggagggcctcactcggggccgccccaactcccaacaggagggccttgctcggggccaccccagcccccaacagaagagccttgctcggggcctgctgactcgctttacccgggagtctgagtgcttcggacgtgaaggccacgccctcagcaagtcagggtcccccactgcacgtgggacagggcaggaacagtgagtgggggcagcagcagctctgaaagcaaacctgtggggtcatggggccccgcccacacagcggggcacaggggtggccactgatgggcttgtcccagcctggagaccctcaaagctggcttcttccagcagctgtctgagagcctggcgcggagcccccacttcccgaccaccttcctcaggctcccggtgccccgtcgccatgagggggttccaggaacccctgccgcccagaacttgcctccagggacacaggctgcctggctggggaccacccccagacacccgggccactctgtggtctatccaacccagcctggggccgcttccacaggcgtcaacgatgaccacatcttcctcctccatggctgcccgcccagagctcacggtggtgcccagcacaccgcaggtgcacagcacatggtggcgatgaagtgccaggcagcagtgtgtgcctcaataaagaactctggggggtctggggagcaaggggccaggaaggggtctctcaagaggggatgtgtcagttgaggcctgacggaagagaacagccggggaaggggcagagcatgtccaggcaggggcgcggcagtgtgagggccccgaggcggaaggagctcgttgtgttctcagacgacatcgggcagaagccacctggagaccccacagctcccaactgcgcaaccggcgagcaggtgcagtcggcccagcccacacgttgcctgctccaccccctccacaagtggatgctgcttcagatgagctgtgtcccccacaggcacatccccgtctgaacccctgcagctgtaatcatgaccccatgtgaaatgaggtcttggccaggtatggtggctgacacctgtaatcccagcatattgggaggccaaggcgggcagatcacttgaggtcaggagttcgagaccagcctgaccaacatggttaaactctgtctactaaaaatacaaaaattagctgagtgtggtggcacccgcctgtaattccagctacttgggaggctggggcaggggaatcacttgaacccaggaagcggaggttgcagtgagccgagattgcgcctttgcattctagtctgggcaacagagtgagactccatctcaaaaaaaaaaaaaaaaaaaaagtgatgaggtcttgcagacgtaggtaagatgaggtcatcctggaggtggcgggccctcatccaatgcctggtgtcctcatgggaagaggaacatttacacacagacacacagagcagaaggccgtatggagacagagacgggaaggcagaccgccacacaacacaggaacaggccgggttctgcggctgcaagccagggagggcccaggaatcaccggccatgactggagctgggagaggcaggaggggcctcccctcggcccccagagggagtggggtcctgcccacacctgcccacgccttgattttggacttctggactccagaacgaagagatgataagttctgttgtcttatgccactggtgtgactggtggctaaatggcaggcgcagaacgaaagaaccagctcagacgacagagcgcctggaactgtggaaccctgtcctgggtacatgatgccaagagctggctctctagataggtttcaggttgggctggtgttcggggcaaagaatggctgaagcttacaccgcaagagacacagttaatggcaagaaaatgacggtgggctgggcgcagtggctcatgcctgtaatcccagaactctgggaggccgaggtgggaaaatcacttgagcttaggagttcgagaccagcctggccaacatagtgagactccatctttacaaaaaaataaaaaattagccgggcatggtggtggtgcctgtagtcccagcaagtcaaaacgctgaggtaggaggatcgcttgaggccaggaggtcaaggctgcagttagccacgatcacgccactgcactccagcctgggtgacagagcgagaccctgagtcaaaaaagaaagctggccgggcgtggtggctcacgcctgtaatcccagcactttgggaggccaaggcgggtggatcacaaggtcaggagatcgagaccatcctggctaacatggtgaaaccctgtctctactaaaaatacaaaaaattagccgggcgtggtagcgggcgcctgtagccccagctactcaggaggctgaggcaggagaatggcatgaacccgggaggtggagcttgcagtgagccgagatcacaccacttcactccagcctgggcgacagagcgagaccctgtgtcaaaaaagaaagctgatagcggcagaagcttgcttatgcgtgtgtgtgtaaaaccaactcttgcacgatcaagggcaggctgggagtgtctcaagtgttggggtctccagaaacagtggaaatgctacagggacagaggccaccacccggcggggcccaccttattccagatgaaggtgcccagcaggttgttgtctccgaaggggttgtcggtgttggtgtagcccatgtactcctcaccccagcccatcttctcccgcttcttgcgctccttggcctccttcttggccagccgccgtgcgcgcttctcctcgggcgtctcgaaggccttcatcagctcctcctgctgcttccgctcctcccgcagccgcagccgctcctgcaggctctgctgctggctcagggcagccgcggccgcccgggggctctgggatcgccctggagacgcggagctggatgctgaggagctaggagaccacgagcgtgcgcgccgtcgccggcgagcccactggccccgtgactgctcctctcctgagtccgactgagaggacccatctcttgagtgccacttgggccgcggggggctccggcttcgcatccctgagcgctgccaccgctcttcctctgaatctgacctgcggagaggaccatggatgcctgctcagtgcctgcagctgtcatctgctccacagatgcttactgggtgcccgtgggggagcaggcactgttctaggttctggggacacagcagtgacccaaataccgatggcttctgccttcctgggctcaccctctggtgggccccaacaaggaagacatcaacaaataaacacaccacgcaacactaggcagaggcagaagccacaaagagtagcaatgccgagcacaggggctggggctgcagggccgaggtcagagaggggctctctcaggagctgacactgagccaaggtctggagggagtggggaggcagcgatgggtggattcggagggagagtgctcgaggcagagcaagagcgagggcctagaggcaggcactgacctgccacattctaagaacaacaaggaggctgtatggctgagacagagtgtgggggagagggaggaggcgcgggcagggaggtggctggggctggtggcgcaggaattataagggtacgaaccaggggacccgaacacatttaggctgtcaagggagggcttcctagatggaagtggtatttgaactagtcccacaggatggacaggagttaacagagtagagcgcagggaatggaagatgcacaacctcaggggtggttcaggggcctttaattttatttattagagacaaggtctactagacacagagtctactagagacaaggtctatatttttatttattagagacagagtctccctctgtcacacaggctggagtgcatgatcagagctcactgcagccttgacctcctgggctcaagccatcctctcgcctcagcctcctgagtagcggggactacaggcacacaccaccacgcccaggtaactctttacatttttttgtacagaggggtcttgctatgttgcccaggctggtcttgaactcctgggctcaggcaagcctcctgtctcagcctcccaaagtgttgggattacagatgtgagccactgcgctcagtcacgtttaggggtctttgtacacagagaactgccaaatattttgttaaatgctctacccattaagctcatgtcaaaaaaatctaaactatgttgaaaccaatcattgcagagcccttaaatattggccacaagttcaactgaattttcgtgaacattaattctaattacatatctagagtggcaaattattgtgaataattccaataccagaaaatggtaggcgaaaaaacacaaagatgacattaacaagacttatgggcaggcgcggtggctcacgcctgtaatcccagcactttgggaggccgaggcgggcagatcacttgaggccaggagttcaagacctgcctggccaatatggagaaatcccagctctacgaaaaaattcaaaaattagctgggtgtggcaacaagcacctgtaaccccagctaccggggaggctgaggctgaagaatcgcttgaacccaggaggcagaggtaacagccgagatcgtgccactgcaccccagcctgggcgacagagcaagactccgtctcaaaaacaaacaaacaaaaaaaccaacaaccgatgagtgaacttggcccagagcggggcaagactggcctgagtgtcagccacgaaggggctgagccagcactggggccccggtctgggaatcagtccctgtccccattttggtttctctgtactggagccggctcaaggcaaatccgaccaagtgccccatctccagaagaaaaggaccatggggaagctgagattcaggcactaggaatcagctgtgagtcctgccagctgacaccgagtctttttccctcccacagcccacctccattagcaaatgttgtctcctctacttccagaatccctctgaaatctacgcactttgcccgctgtggttgactacagcctccctcccatcgagactgccatcatctactgtctggacaattgtgccgtcctactctgatgccgctcctgcctaccccgctccatcccttctccacctcaaagccagaaagtatgcagagttaagtcagtccacgtcactcccctacccaaactcctctcaagactctccatttccctccgactaatagccaagatctaatgtgctgagcacacagggctcgatatgatatgatctgatctctcgttacctccccgccgcctcgctcacccggctccgggctgtccctccaaccgcccggtcccctgcctggaacgcctctcgccttccttccgctgccaggttaattccaaccggtggtcaattgtccccttctctaggaagccctccccgagtaagtcgggggtttcccggttccccgggatctccaaccctcggtcgggcgctcctgaggtaggagccggatccccagcgctgctcccgcagcgaccccacctgcgctcccggctccgccgcctccgtctgcgccgtccctcgtcctcccggcgccgtcggtttcgccgcccatggctcctgctccgacttcggctcccgctctgactctgccgccttcggccccggcgacccgcggaccgcgagcgcgagcgtgtgtcccgacccatcggctgggccagtggccgcggcaccaacaccaatagccgaagcctgcgctgggggccttcctcgcccacggcgctctccaggctgccccgtttgcgcctgagccgggaaagagcaacccatcccgtcgccccagcccgcaaggactccgacaccccagactttccactacgtctgcaaatgtggaccgcgtgattgactccagtgggattgttgcctccagggtggcggagtctcctttcaggcagtgctggaggcagccctaggcgggtccccacgcctcagggggcctgagaaactgtgggcggggcaagggcaaactaggaaccttgtgcagggaggggcctgccgaggcgagaccaataagaagcgggtctaggtcggaagtagcgcttcattggcgtggccaggggcgtggccgaggagaggcgtgtccggggagcgaggtccccgaaaggcgaggaaccgggaaggtgttaggtgccaggcagctccagagggcagagggcgggcgcggggacagaaactgaaaagccttcttatgagagtcatcgttatgctccaccacctgccaatgaacacctatgtattttgggagttaagctttaaaaaaaaacaaaaactttgataactccctgtattcccccatcaacccattttagagacggggaaactgaggctcagagagggaaagtcactcttaacacttgccttctcaacccaggctgcccagctttgtggtgtgggtgctggggacccgtgggagggttgtgagcagggtttgggggacttgctgttgaaacaagtttggcgtgggaggacggacttcaggggcaaggctggaggccagagacctagaagacgctgatgtcccatcctgagctcccctagcccatggtggctgctaccaccaccccgtgcagttctaaccactcggggctgggaaggcctgtttatggaggatgatagtaatttaagctaacttttaaaatatttatcttggccgggcacggtggctcacgcctgtaaccccagcactttgagaggccgaggcgggcggatcacctgaggtcgggagttcaagaccagcctggccaatatggtgaaaccctatctctactaaataatacaaaaattagccgggtgtggtggcatgcacctgtgatcccagctacttgggaggttgaggcagggagaattgcttgaacctgggaggcggaggtcgcagtgagccgagatcgtgccactgcgctatggcctcggcgatagagcaagactccgtctcaaaaaaaaaaagaaaattaaaatgtttatcttgagtggggtgcagtggctcatgcctgtaatcccaacactttgggaggccgtggcaggtggatcttgaggtcaggagttcgagaccagcctgtccaacatggcgaaaccccgtctctactaaaaatacaaaaattagctgggcatggtggcatgcttgtaattccagctactcgggaggctgaggcagaagaatcgcttgaacccaggaggcagaggttcctgtgagttgagatcgcatcattgcactccaacctgggcgacagagcaagtccccgtctcaaataaataaataaataaataaataaataaataaaacgtttatcttggaatacaacttcataacatccccgtaaacgctggctttgtatgctttgcttggtgttaaggcaaggatggaaccttacagaggaagaagagaccatctcctgccgctctagatgatgaccttgccggtcctgagatgtgggttgtcatgctgatgggatggcccaaaacaaagcgaaggcctgaccctgtgcttcccaaaattcagatgcatccttgcagcacattaagagatcacttgcatgggccgggcgcggtggctcagtcctgtaatcccagcactttgagaggccaaggtgggtggatcacctgagttcaggagttcgagaccagccttgtcaacatggtgaaaccccacctctactaaaaatacaaaatttagccgggtgtagtgccaggcacctgtagtcccagctactcaggaggccgaggaagaattgcttgaacctgggaggcggaggttgcagtgagctgagatcgtaccattgcattccagcctgggtgacagagcgagactccatctcaaaaaaaaaaaacaaaaaaacaaaaaacaaacttaaaacaacgagatcacctccatgttcagtttataaaacagctgtgctgaaacgttccaacggctcccttacagacaggatcttactttttttttttttttttttttgagacattttcttgctctgtcgcccaggctggagtgcaggggcatgatctcagctcactgcaaactctgcctcccaggttggagcaattctctggcctcagcctcccgagtagctgggattacaggtgtgagccatcacgcctggccaggatcttgttttcaatgtagtttctcaacctgggagtccaagataaatgtgttcccttcaaggggtccaaacgtgactgaattggaaccgctctagcagaacaaatacaaactttggggggctgcaaagatgttggaaacaataaaatgttttctgagctgaactgggacctgaagaaggttcacagctggtaaggtgtttgggtcctattactggtatcagcatcaatctcacaaaggtttctctcttctctaagattcaaagtcagtcctcaggccaggcacggtggcttacgcctgtaatctcagcactttgggatgaggcgggtgggtcctttgaggtcaggagtttgagaccagcctggccaatgtggtgaaaccccgtctctactaaaaatacaaaaaaattagccaggtgtggtggcgggcgcctgtggtcccagctactcgggaggctgaggcaggagaatggcttgaacccgggaggcagaggttgcagtgagctgagatcactccactgcgctccagcctgggcaacagaacgagactccatctcaaaaaaaaaaaaaacaaaacacaggctgggtgcggtggctcacacctgtaatcccagcactttgggaggccgaggtgggcggatcacgaggtcaggagatcgagaccatcctggctaacatggtgaaaccctgcctctactaaaaataaaaaattagctgggcgtggtggcgggcgcctgtagtcccagctactcaggaggctgaggcaggagaatggtgtgaacccaggagacggagcttgcagtgagctgagattgcgccactgcactccagcctgggtggagagcgagactccatctcttaaaaagaaaacaaacaaacaaacaaaaacagaaaacaaaaaacacagaacaaagtcactcctcagactcccaaccagacctccggaacccacagaaaggcaaacaggcggatgcttattacccgatttattagagagatctctaaaaagacggggtgtggcgggggtaggtgggcgaggaacctgggatgcaaaccagtgtttggggccaggagtggctgtatggtttcagaggcgcccaccactctgggtttgagggacacagcaccctcgtctcggcgctttggattgtcacgcaccagaccacggggcggaggaatggagtggcatccctggggggagttaagacacacgaggtttgcagtttcattttgtttcagaatcagtttggccataaaaatgggactgggttggggacaggcggagcgattgaaccaccggagatgaggaggaggtggcaggcgcctctcctggggtggggactgagggctgtggagacagtaccatggtgaaggaccccatggcaatgggagtattgcactgagccaggtttcgggggaacggggacgtgtcgggatggcgtagggggacagagcctggcaggagacacatggaagtttccgccttgtcagtctcagagcaaacgccttttagtctttacagtacaggaatttggacactgcccacgttctcagtggacagcagccatcagaggtgacccaggaggggaagtgggcattggtcaccaaggtatttacagacttctatcatgggggacagcggggtgggtccagcagcctccctcgcgggggatctgagggagaccgagttcgctaaatattataaataggtcttgccgtcctcctgcccccgcccctcggcacagtcagtggagcacgtcagcctcggtttacagttctctgaaaaggaaccaaaaaacacaaccaacaccaagtatatctccaaaagggccttggagacaacacaagaatggaaatgaaatggtatccacagaggtttgcacatttctcctgcaaaggcgcgtcggccgggcactggtgtcccgtgtcactcagcggagggaggctgccctggacgcggtgccgcccgcccggggccacacctgctgctccgagtcaccccacaggctcttggcgtctctggtgccagggctctgggcagggcgactcgaggactccctgggaggactggtgtggcctctgggggttgggcctttgagatgacaatgcccctgtccctgctggccatccaggtcccagacaccccttctgacctctgcccctgcctccccggggggtgcctgctgggtgtccttcggagggacagggcgggggctgatgggtggatgcccggtgccagcagatgagcaccaggctgtgaactgaggccaaggtcgcttcccagggctggacagaccctctgagcacgcagggaggaccccacgtgggcttgtcctgatggatgctgggagccacgcggctggccggttcccgaggagggtcggcccctctcctgggcagagtggaggggctgctctcgtggagtgtgtgtcctcgctggggacctcggggatgggtccggcttctccacagcaggggccttccgggcgcagcgtgtgggctgtgcaggaggccgacgggacgtgaacagcgggtggcgtggcgtcatacggaggttgtaacagacaaaacacagagccctgcctgggaggttctccggccgtctcagaccccacaccaggctctgccaggtctggagaggaattcttcccaaaggtgcagcttccactccagctcctcacatcctgggcacatcttggaagtgggggattcccacagccatcaccaataagcccctctcaggggtcctggggaagggcagggtgggtgactctgccgagctctggcctccaaccagcaccctctgagcgcagcgggcccaggaagctgccccagggcagtctgggctgagtcccaccactgggagcgctgccctcttggagggtgatgagtcggaaacaaagtcttctctcccctcctcggagacatcacatcacttaaacaagaaagaggcggcggacatccacaccagtcctgaaggagactcctgtggagccgggcctggccccctaggccatgtctccacgtggagggggcggggagcctgaccttccgccctgagctggtctcctgtggcccaaggcccggcctcccgctctgtcctgccatggagaaaacgtctccgttgcctgggccctccatgccagttgctgagtggcctacgttggaagagaaggacaagtccccagccctgagctccgccagcgtgggtggcagcctggggaagaggaggcctggccctccagctgtggtgggtctggattggaggcgccagaggtttttgctcgaggggcacctgggaggtgggcgtcagggccccactgcggcgggaacatagctgctgagtggccgcagtgcttggcagggcgagggctgtccccacagtcgatgttcaggccagatgtcctgcactgaggcccccaaacccaagctgagggcaggagggtccgcttcccacgtggatggaggcagagttgctcgggaccccagccgtcccctctgcaggccgatggggcccccggggctcaggtccccagaggccaccgcgaacagcctggcttcttcctcaggacacaggcaggcacagcagagaaccaaagagtgcagtgggcaggggctcttctccctctggttggtttgtttgtgtcttttttgttcttttcctaaaacggcacacacgtgcttccgtctctgtgccaaataaggactcaaatgcgattggccgctcgggagggtgggtctcacaggggcaggctgccgaccggggtgccggggccctgggaggcttgtcggggaggggcccggccgtcggcatccgtgcagggggaggacgaggtccggtggggcggcgaggcgggcatctcccgagctctgggcctcagcggggtgggcagcgccttcgggggcagccggagcagaagtggagctcggctctgggtcgggggctgcatagaaattactgcaagagcaagaggacaggtgaaggtgggcggggcgagggcccaccccaggccccctgccagggactggcttccttgggccaacacaggccctgagacacttagcccacggccacctcagagccagagagcccagggtggagctctgggccacctgtgccctcccgccccgggcctcagtccctgcctatcccagtagctggggaccacgctcagtagaaccttggagcccacgggaccggcgggtgcacctgggctgcacttactgtgtcgctctcgccgtcggaggccgggggggcctgggcgctatagtggagcggggagtacacccagctcctctcatcggtgggctggcaggtgggcgcgcgtgcaggagggcgcggaagagcagggtgcgaggaggtgcaagagaggcagagggaggaaggaagagacaggagaacataaaagaggcgaatcccccatggaagacgaggggtggctcagcccagctgccctctctgacccggtggacttgctcccaacctggacgggcctggggcctcagctcagcttggcggggcggggcacggcgggcggcagaaagcagttagttcagtcgaggcagggcctgagatagcaggtgacagagccggcggaagcgggtgggggtcgcgacctggagcaccgagtgttcctcctcctcctcctcctccacagcccggccccaccacagcccccaatcctgcctgtgccacgggcaccagcgcacaggctcctggaagctctctatgggggtcctgggaggtcggggtgccggacctacttcccaacccagaagccttttgggacctgaatatatggctgcctgcgggcagggccagtcccctctgccagcacagacgtgctaggagagactgaggctcggaccacccaccctgcaagagccaggagacgccttcctgagcagcagggcagagtgagggccaagttcagggctaggcacaggcagggccgtgtgcagggacacggacagctcttcccagctgtgcctgcgtgaggggtcccaggtctgggtgggatctggggagggagggagggtgcgttcctccaacacctccgtcccgcctcctgaggagcccccaccccctcaagctccccctgcttctcctgcccctaggctgctctgctttctcagggctccagcctggccgccctgtcttccttgttgtgtcctcctctctctcgggcctctgtcaccaacccagccttcaacgcccctcccggcacagatgacctgcgaatttccaccaggcctggcctcggcctgaagtgccaggcctgaatacacacctgcctggccacgtccacctggcggccctcggcccctaaactcgccacagtcacaacccagtccatcaccccaagacccactgctcgtccttccagtcaggatgacgctgcccacctgctgcccaggccaacccatgcctctgccagctcccagttgcccagcctgggccagcaggggcctcccttgtgctccaggtgagcccagacctcacctgcaggagcactgcctctccctgcctcgggctctgcctccatgctccctctaaagggcccacctctgtgctcactccaccctgcccgatcctacagcttccacaagacccctgttcccgggccctgggcaccgagggcagcgcactcctgccctgcgaggccgcatcgcggaggactgactcctgcactgaggggccaggaccccagcgcaggccttgcctgttcctccagggtagcaaatgcagcctggaatccctgacgtgggaatggcaggtcaggtccacccaacgtcccttgagagcccggcatggggagcctatgtgggtgctcagtactgatttggtggctgcactgatggatcccatggggacttgaaaatgtggggccaaaacagggtccccacctgagccctgaaagaactggcccgcagggaggagggtggcagcagccacctcagagccgctctctgggaggggcatcccgggcacacacagcacgtgggcagggatgacagtatccttctgctacagcattagaaacggggatacaggccaggtgcaggagctcacgcctgtcatcccagcactttgggaggccaaggcaggtggatcacttgaggtcaggagttcaagaccagcctggccaatatggcgaaaccctatctctactaaaaatacaaagattaaggccgggcgtggtggctcacgcctgtaatcccagaactttgggaggccgaggtgggcagatacctgaggtcaggagttcgagaccagcctggccaacatggtaaaaccccatctcttactaaaaatacaaaaaattattggggcatggtggcaggagcctgtaatcccagcaactcgggaggctgaggcagaagaatcgcttgaacccaggccagaggttgcagtgagctgaaattgagccactgcattccagcctgggtgacagagtgagactccatctcaaaaaaaacaaacaaggctgggcgcggtggcttacgcctgtaatcccagcactttgggaggctgaggcgggcagatcacgaggtcaggagattgagaccatcctggtgaacacggtgaaacctcgtctctactaaaaatacaaaaaaattagccaggcatgatggcgggcgcctgtagtcccagctactcgggaggctgaggcaggagaatggcgtgaacccgggaggcggaacttgcagcgagccgagattgtgccactgcactccagcctgggcgacagaacgagactctgtctcaaaaaacaaacaaacaaaaaactcaaaattagccaggcatggtggcaggcgcctgtaatctcagctactcaggaggctgaggcaggataattgcttgtacctggggggtggaggttgcagtgagctgagatcatgccattgcactccagcctgggcgacagagcaagactccgtctcaaaaaatgaaaaaaaagaaagggcaggacaggtggcttccttgtcctgcaggagttggggggacagagagggacaccctcagccagcagctgggcagacaggggaagtggggggcagtagcagctgggacccagaaccgggtgaccccaggaagaccagaaccaagggcacagcctcttcagcactcaggccttggggtgctttcaatggctgccctgcctcccttctggcccccacacttccgcttctgctgtgcctgctgccgagaccaccctccccacgtctgccccttcaagtcaggtgtttttcaaagtccaagcacccccctccgtaggcggcctctgcgaactgctccctgcctatggtggggtggccagcagggccgctgggtctctccagtgctcctcctcccagcaggcccctctgggcagctcctggacgatctccggggcacggcttcgcggtggctggcttcccgctggctccgtgggacggagctgcctagagcagccggggaagtggtctccacctcttggggtcactccacagtgcctggcacacagaggtgctcggagaggtttgctgatgggcggggagtcacggcggcctcggcggaggctttgtctcgaggggacactcctgctttgggtctgcgccccgttctggctgtgcggtgctgggcaggtctcttaggctctctgggccccttgcttattggtcataatgacaacagcaggccctgaggatctcacagctacgtggggcccatgtggcgtcccagggggacctccttgagagcttggggatctggattttgactaaaccgtgtggtctcccaggctcccaggggagccgaggcctcagcgcctccatctgtgaggtgggtgtggagagaccatctcctccccgtctccatggccctgcggttcagagcccggccctgcagccactctgctgacctgtgcaacctcccctgtgcagccagcggggccacgggcagccaggtctgcacgagtgagaagcgtccacccaagacaccctgacacgagagggctgggtccaggggcagagaggggctcgctggggtctggccggggtccgaagcagaccctgggcctcagctgtgcacctggtgatggtgctgccctatggagcgcccggttcgacgtgggaccgaatgacattcccagtgacgcatgcagcccagcgcctggtccggggccagcgtggctgacctcaattgcagccgtgatttacccaaagcccttctggaaaacaactgacgtcagacactgagcttccggccggggacctgcggctccctgctgcccgaggggcactgccccttctccccagggtggccggctgcggtcacttacagtccccgaggcgctcagcgtcacggcccgcagtcggcgatggcggggagagtaaatccagtacctcccatccgtgaactggacggggcgggccgggtgggccggaggaggaaggaaaacagaggacagcggatgaggcggccacccccgtggtcgggtgggagaggcggagggaggtggcggggagcaggtggggacagctgactgccaagcagaaggtggggggtgccggggcaggggcaggaccgaggacccttctcccttctctgctgcccacctggcagggcatcaggacacagacacacagcacgacatggcccccaggccccccgtaccatccggagaccaggacgcgcacaaaccagtcccaggaaaaggggtgacgacgtgcggtgggtaggggcacaggcacgcggcccgtccctcccttctccagggccaggtgggtgcatggggaccccagaggcgccactggagacagagcaggggagttagttatgaagcagcgaggaggtgcccccacaacaggccctaaggcctggtgcccgtgcccagccctccttcccagggggtgcagggtgagaacaaaccatctgggaagtgggctgcagcctccggccctccctgtgacctggggctgcctgatctgagtgggaccactggggagtggagacgctgcctggacattccaggcctcgctggccgcccggcagccacctcacccagaccctggcaagggagagcagggatcccaggtccccagggccgggcagaccctgccctgcccagtagcagccacgagtccccagcccacggcgtgggagcgtgaagccctcctgccactgcccggtcccccggccctcctcaaggataagcccacctggccacgcccacggcaacagggagaaggtcctgccgccacagccctgtctggacgtctaggctgtcaaggacacaggacctcagcctgtgccagggcctcccgaggggccaagagtctgaggactccggacgacttccagggagacgggtggcacagaaggtgccgtgggcacaaggccggggaaggggacaggggtggctctggggcctcagaaaggcctggtttggaggagcttcccaccccatggggttagaccaggaagagaaggtgggtgtgaacgtggctggtgggtgcgtgtgggcgtgtcgtgagagtgctggctggtgagagagcatgtgggtgggtcgacagggcacactcacgtgcctgtgtgcaggtgtgtgtatgcggtgtgcacacggtggagcgtgtgtgagagagagtccggttgacgagccggcggcaggaggagcccggggcacttacaaagtagatgtcggtggcgggcgcgtcctcctcgtccgaggcctggctggcaggtgcgccctcctcgtctgaggcctggctggcagtttctacttcaacagcagcagaggcaccggccggggaagcctccaccctggggacaggagtagacagagggtcttgaccctcaggccccacacggagactccccgcgcccccactcaggacccaggcaggggcttcatacggtcatcacggagatgaaaagccaggcagctgaccacaggccgcgcgctcctgcgctgccatttatcgcaaatcagaacaaacctccccaagaagcccctcatgctggccccaggagtgacctggagtgacccgccagcccgctgacagctcggccctgccactcccagctcagacacacacacctgtgggcacgtgctggcctcaccctcaccggctgtgccaccctgggagggcctgttcctcctctgagcctcagtttcctcatctgtcaagtggggagagatggcacctagccgctgggatcagagcttcttccttctttcattgatttgttttttcagacaggccctggctccatcagccaggctggcgtgcagtgctgtcatcacggctcactacagcctccaccgcccgggctcaagcgatcctccaaccttggcctcccaagtagctgagactataggtgtgcactgctacacccaactaattttttttttttttttagagatggggtctcactatgttgcccaggctggtctccaactcatggggtcaagcgatcctcctgcctcagcctcctttaggagggatcacagacggaagcctccgagcccagcctctttgttcttttcactgagcacttactacatgccagggctggctcccgtgattaacccactgagtctatcatgggggatggagagggtgcggctactgcccctgtgttgcatttgcggaaacggaggcacggagaggaggtgaggaacggccttggccttggctatggccacacggtgcatcgtgttcatcccaggaatgaggctaaacatgccctcctgccatgtcggaggtacagttcctttcagcaaaacctgaaatttcacggtgcaaggtttggcaatggcaaagagttgacagtggcaggagcactgggtggaagataaacccccagggctttagttttgggtctacgctgctgtgagcgctaaaaaagctctcttggaacaaaaatacaaaagcatctcaggcaaaaatcattacaaaggcaagaagaatttggtaacagtgcaagcatgggattatacacaccagacagatgacagaaaagtaaaaacatacaggggccgccacggggctcacgcctgtcatcctagcactgtgggaggccgaggcgggaggatcacctgaggtcaggagttcgagaccagcctggtcaacatggtgaaaccccatctctactaaaaatacaaaaaaattagccgggcgtggtggtgcatgcctgtaatcccagctactcgggaggctgaggcaagagaatcacttgaacccaggaggtggaggttgcagtgagccgaaatcgtgccactgcactccagcctgggcaacagagcgagattctgtctcaaagaaaataataataacagcagctgacaccatatccccaaaagggccagaactattgtgtcctgtgttttttaaaaaaacagatatttcttttaagcctttttcttcaatacaaaaatcaataaaattaatcccagtactttgggaggccaaggtgggcagatcactcgaggtcagtttttttttttttaggtggagtcttgctctgtcgcttaggatggagtgcagtggtgcgatctcagctcactgcaaactctgcctcccgggttcacgccattctcctgcctcagcctcctaagtagctgggccgacaggtgtccaccaccacgcccggctaatttttgctattttttagtagagatggggtttcaccatgttagccaggatggtctcgatctcctgacctcgtgatccgcctgcctcagcctcccaaagtgctgggattacaggcatgagccaccgtgcctggccaaggtcaggagtttgagaccaagcctgcccagctggctgatgggagaaaccctgtctttactgaaaacacacacaaaaattagccatgcgtggtggtgggtgcctgtagtcccagctactcaggaggctgaggcaggagaatcacttgaacctgggagacggaggctgcagtgagccaagattgagccactgctctccagcctgggcaagagagcaatatcctgtctcacaaaaaaaatttaaaaaattaaaaataaaataaaattaaattaataaatactaaaaaggttaaaaaaaaattagttaaatacttggaagttcagagatgctcttacacaacccttagcccagggtctcttgcctgggccctgtggacactggaaccaggtccttctctggggtggggccatcccgggcactgcaggctgatgctgagcagcgtccctggcctccacccactccatgccaggagcaccccccagttctaacagtcacaaatgtccccaggcatcgcccagtgtcccctgggggctaggatcaccccggctagtcgagaaccactcccttcaatcaaaaaataaacttatgggaaaatccaccatctgtgaatacaacctagtaagaaagaactgcttcatgatgaaacctcggggtgctcttggctcctctgggcccgcagcaggtgggcgccccgacctcccgccgaggccgtgctcaccctgcgtcctcctctttggggaccacaatctccacgctgcacgcaggctccacctgcactgtaatctgctgcagatcctcttccgcgggtggctcctcctgcggcctgcaggcaatgggaggttgtgcctcggtttccctcctcacttcccccatcctacccccaggagtgcccagtgaactccagggccagtcccagaggggagttgggagcctcctgattgggtctgttctttctggctgtcactcccagcccggggactgtccacctgggtcccttggtgactgtggtgccagcagggcctggggtgtagcgggctctgggggcatatgagcaaatggcagccccgaccggtgtgggtgccacagaccctgcccaccctccaggcagtgcctgcacctggcagccgaggccctgacacaagtgactcagtgtcccggccgccgggcctggccatgtaacatgtctctccaaatggcacgctagactgcagggagggtcacatcccacccagggcaccaaggggtttctttcaccaggcggcagcgattaaaacacggttaagaaaagcaacaccgcgccactgccccagtgttcacaagagtgagaccccagggacctcgcaaatgtccccgagggctgggcacttaaagccaggtgcagtccatgggatggaaggacggcacgcaggcgtgacaggaacggcgcgcacccacccctgagatccccgtcagtcgagtgacaacagcaaggtgtgggcggcgtgcacgggtgtgcccatttgtgtcaaaataaaagggaaccacaagcctggtgcacgtctgctgtgttcccagaaagtatcttccaagagacaaaacccacagtcccagtggttgctcctggggaggggacaggccgtgggcaggagggggcgcatttcacgatattccctcttgtatcttgttttaagttaaaaaaaaaacttaatagaagaagaaataaggaaggatccacagaccagagctgccctggctctggctgtaagaaaaacaaagtggctggaagattgtgtgcggtgctagggccgagtgctacaatcttaaatctgtccccaggagagaatgggcagagagcagaggggctggggggcgggaaacggagctgggagctgtgcaggaggagctggtgagacccagggaaggaagggggttgggtctcacctgccatcctgtccagacgactgtgtgcgccgcctgcagagatacagcaaacacgtgacacccagaaagagagtggcccgcctgctcagtctacctgccttgcctacccgcctgcctacctgccccctggcagccctgcccacctgtacatatgctcctccctcccacacattggatgctccgcccccgcgcacccacatgcagtgtatgtacatccaccgtacatacgatgctccacccacatgcacagcggatgccccgcccacatgcagtgaatgccccgcccccacgcacagcggatgccccgcccacatgcactgcggatgcctcgcccacctgtaccgcggctgctccgacgtctccgagggggaccgctcaggaatggagagggatgtggatgacagagtcgtggcaatggaggctgtagtggcttcttcgaaagaaggtggcgtgcagggcaggaggtcgggccggcctgaggggagaggactgtgggcaccttgcggagcctccgagcccccaaacacacagtcgattctccctgaggcttggctcaccctgggaacccacagcccagtgcccgcccgcctcccagacactcccacctccccacacggcagggaaggacgacgttccccctcacacaaaggcttctgaccgctctcaaaatagaatccagacagcccagagggccctgtgcagcctggccccgtcccctctccactctccctccccgctgtcttcccctccactgctctcttcccctccccaccccccctcccttcccctccgcgctgcttggccacacgggctccttgctgttccctcagcaggtgtggtcctgccccagggcccttgcatggctatgtcccttccttcattccctagcctgggggctgcatgccttcgatggcatcctggtgcacctcagatgacagtggccgtgagagaaggcgggagctgtcaccaccccacctggtggagccttctatactcagctccccctgggctcttccctggggcggtcccagcagcccccactccctgggcaggcggccctgcagatccggagggggtggctgagcgatgggcactcaggatgaggcggcaccccacccacggggctgctgctggcaccccctgtagcgcccacaagcgcactctgccctctgcccctcaccttcgtcctccagcgtggggtagctgcgggccccccgcaggtcgtactgggcctcctcccgctcgctagggatctggctggccgagaaggcagcggtgggccccagcggtttcacagctagcaaggctccgccgcgccccttcttggagggcgaggacttcagggctgcagggaagggtgggggttggtgcttggggttgctgggggctcatagcaaagcccagacagggccgccgcccacatataccccacgtccctgtggcccaccagacccctaccggtccctgaggccaggaagcaccacaacctcttggtggaaaaccggggtctgcctggggagggactgcgagcccgagttccctgtcctgcccacccgactgtctctatgagacacactgggacctggcacagtgcctgcccctcctgggatcctgcagaccagtgactcccatctaatgagctggccagggatgcctgcaggcttcaaccccttctatgtgcggcccagcccgggcagggcccccactttcagatggacactgacagccttggggagcaccaggtgttgtggttagagaagcctgtggctcagcatgtagggcctgagcgcagatccaggctcacccgctggctgtgcggctcggtctctctgggccctgggggccgaccttagcggtggggtgaggtggggcaggtgatgtcccgcacagggccaggcctgtcctcagtgctgtgtgagctctgcctcctcaccaagctcttgtgacctctgcccccagaatgacccacacagctcctggtaaacagtaggtgctcagtttgccttgtgcagcttcctacaatcaccaaaggctggcaaacagccctggatgacggaatgatcctgtggcatcggtcccagagagtggggtgtggggacaggctcaacggctggctctctggagacagatcctgacacgtggtgtctgccaattcccacggtgttgatgagagggggtccctgacctcgaggccgtgagcaagtgtgcaggccgggaagagcagcctgcctgcaagcgctgggcactggcgtgcctgtccctgccacctccctgcaacccccgtgggtgcggacccgcagatcattcatgccccccaccagacacttcccaagcatctctgtgggccaggcctgtgcaggatgctggggagcccgggagccttctggtggggagggtggctgagaaacagaccccaggggggaatccatctggcagcaggttggccacgggctgaggtctgcacaggggcctggaacccagagtctgcgtccagatgctacagtggcccatgaggggaagctgagccctgagagatggggacctcccccgggcaccctgtgggtgaatcccgagtccccaccttccccaccactgtttgccctgggaccttcccgaccatgccctgctgggctagcctcctgcgttcccctgcccggggtgcgtttccttggcgatggtgatgctgtgggcagccccacacactgtgagctatctgctgagtcaggcccacccatcccatatataaacactgtaccctcacagtgctgtgccaatggggaaaccaaggcacagaggcaggtgcctgctcaaggccacatgggcaggacgaggccaggctaggattcaggctctggcggtggctccagacccgtgctctaccgctgtgcagagcaaatatcccgactaccctacctccggatgaggcccggtctgaggggggcacaggggctctgagtttactgccctgcccagggggctctcggcctcccgcagagtccctcctgccccacggcgctctgggccttccccagggtccctcccgccttgcggggctcaggtggcttacaggagttcttccgaaagaccgtgttgctcatgaacttgaaaaagcgctcggcatagaagctggggcggtggacggacaccgtgtcctggaagagagttggggggggtgcccgggggcagagggtgcatcaatcaacagctggggacagccccagacagacgctgtatgtgtgtggggggcaccttctgtgtgaaaaggctcgagatgggtccatggcgccatggcttcctgggaggggctcacggaacagggaacagtggctccctctggggagggagactgggtgccagggaatgggtggaggcttttccactagagacctgttagcatttttgactttttaaaccagctgaataaagtattccggccaggcacagtggcccacgtggacttgtaggggaggctgaggcaggatggcctggctggggccctgctgggatgtgatctcggcctcccagaatgcaacctcctttcccagcctccttgggtgaggagtggccacgtaccaggactgtgaacgactccacccccgcaggctgcagtgggaggtggtgcccggccactctgggccaggggacaaggacaaccccagggacatgcggcggcagcacaggacaccctggccagcctcgtcagagccgagacagcgctcctatctgccctgggcagcaggttccgggccttggcaaggtttaagacatccccagaggcctctgccagctgccatcctgacccgctcaaggcttattctggaagctcctgcctggaccttctacacgctcttttgaaaaatgggggtgcctgttgggatcttggattctacaggctgtggtcacacagacgttagtcctcagtgcctggccccaggcggtactctgcgtttgtggagtgacggatgggaggaaggctgggacgacagacaggaggacagagggaggaaggatgggaggaggggtgcaggcactcacagagggaggagggatgggaggaggggtgcaggcgctcacagggaggaaggatgggaggagggtgcaggcgctcacagagggaggagggatgggaggaggggtgcaggtgctcacagagggaggagggatgggaggagggtgcaggcgctcacagagggaggagggatggggggagggtgcaggcactcacagaggagggatgggaggagggtgcaggcactcacagaggagggatgggaggagggtgcaggcactcacaggaggaggagggatgggaggagggatgggaggagggtgcaggcactcacagagggaggagggatgggaggagggtgcaggcactcacaggaggaggagggatgggaggaggaatgggaggagggtgcaggcgctcaccccatcgtggacgagggccttccaggtgtgctccagtttcttgatgaacctgtggagagagcacccggagtggcagctgacatcagccaagcccatgccaggccacctcactcaggggccactgtgcaccccccaggacactgggccatggcctcaagcagtcgtggctgtcaaaactcagggtggcaggtgctcctggcagggagtgggtggaggctctctgctcagtaccctgcagggcccaggacggccccaccccagagaaccatctggtcccaatgtccatagtaccgagggggtgactgtttttaaacattctagagccccagctgagcacggtggctcacacctgtaatcccagcactttgggaggccaaggcaggcagatcacctgagatcaggagttcaagaccagcctggccaacatggtgaaaccccatctctactaaaaatacaaaaattagccgggcgtgctggcgcgtgccagtaatcccagctactggggaggctggggcaggagaatagggtcgactcagaaggcagaggttgcagtgagccaagatcgcaccaatgctcttcggcctgagtgacagagcgagactttgtcttaaaacaaacaaatgaaaaaccaaaaaacaaatattcgagccccaaagtgaggcctcaaacccactccttggattttcttttttctttttttttgggacagggtcttgctctgtcacccagcctggggtgcagtacggccatcatagctcactgctgcagccccagactcctgggcccaaggaatcctcctgcctcggcctcccaagtagctgggactgcaggagcaccaccacgctcagctaattttttgatattttgtagagatggggtcttgctatgttgcccaggctggtctcaaactcctgggctcaagcaatcctcccgcctcggcctcccacagtgctagattacaggtgtggaccactacgcccaactcactctagattttcaaggcgaccaaacaccttccctttagggctcaagaaggggcagccaagcaagagctttccaggttgaggaagccccgagagctgctggtgcggctgtttccacgggcaagcgcctctgtgcatgggtgtcctgggggcgcccatccacctgtgggactgcagacccaggcgcccacctgtggggctgcagacccgggcgcccacctgtggggctgcagacccgggcgcccacctgtgggactgcagacccggggcgtccacctgtaggactgcagacccgggcacccacctgtaggactgcaggatgtcgatgatgccaatgtgcagcagcagccgctccccgcggccgttcacagcggggatcccgcccatcctggggagagaggccgagggtaccatcagcatcccgcagagctgggactcggggcaggcggggctggggactccagggctagggagtccatctgctcctgtgggtggcaacttggccaagctctcggagtggggcctggcacccgggaacctctgtcctgacatccctccatcacccccagcctcaaacccaggcccaggcactgctgaggagtcccagctaggaggcctgggcacataccccctacacacacgtgtgcctggacacacacatgcacacacacgcacactgcatgcccaggtagggccacggggtctcaggtacagactggggagttaattgtcacccggcaccatgcccacacgtcccctgcccagcgcgggagttaactgtcacccggcaccatgcccacacgtcccctgcccagcgcgggagttaactgtcacccggcaccatgcccacacgtcccctgcccagcgcgggagttaactgtcacccggcaccatgcccacacgtcccctgcccagcgcgggagttaactgtcacccggcaccatgcccacacgtcccctgcccagcgcgggagttaactgtcacccggcaccgtgcccacacgtcccctgcccagcgcgggagttaactgtcacccggcaccgtgcccacacgtcccctgcccagcgcgggagttaactgtcacccggcaccgtgcccacacgtcccctgcccagcgcgggagttaactgtcacccggcaccgtgcccacacgtcccctgcccagcgcgggagttaactgtcacccggcaccatgcccacacgtcccctgcccagcgcgggagttaactgtcacccggcaccgtgcccacacgtcccctgcccagcgcgggagttaactgtcacccggcaccgtgcccacacgtcccctgcccagcgcgggagttaactgtcacccggcaccgtgcccacacgtcccctgcccagcgcgggagttaactgtcacccggcaccgtgcccacacgtcccctgcccagcgcgggagttaactgtcacccggcaccgtgcccacacgtcccctgcccagcgcgggagttaactgtcacccggcaccgtgcccacacgtcccctgcccagcgcgggagttaactgtcacccggcaccgtgcccacacgtcccctgcccagcgcggttagtgaggccacacgtgcagcagtcatcctgaagccactgggacccagacccgctgggctggcgccctgcacgctctgctcacgccacaggctggtacgctcacctgctcccccgccaggccagcgaagaccctacaaacgccaggatggtctgagggggagctgtgcctggccttggctcccgcacccccccgcagctacaccctggttggggccccggctcctcctctgccatccatgggaaataccaccaccgctgcaaaccaaagcccagctggtggcctagtgccagccagtgccagccagcaccgtccctggggccaggccaggtggaacttggctccacaccttcgtggctgcactggggaaggctgccccccaacctaggagcctatttcctcagctggaaacaggggaagcccacctccctcctccaaggccgctgtgaagactgaacaggtaccaaagtgaaggctcgggcctgcccccactgtcagggtgctgctgtgaccagggcacaatctcagcactgctatacgacacctgtctatcccgcatccggggccatgtctggggacatctgtggttgtcacaactggggggtgctcctggcccggagtgggtggaggcccgggacgctgctcagcaccctgcagtgcccaggacagccccaccccagagaatgacccagccctcacatccagtgtcccaggagagctctgtgagtatctccccagccaaaccctgagccctgtgagggcagggcctgcctggtccctctgcccctggtgtccagcagacatgactgcaggccactgagatgtggcctcctctctccaccaccgttcctatcttctgtggcagccactttttttttctttttggacagagtttagctcttgttgcccaggctggagtgcaatagctcaatctcagctcactgcaacctccacctcctgggttcaagcgattctcctgcctcagcctcccaagtagctgggattacaggcgtgcaccaccacgcccagctaatattttgtattaagcagagatggggtttcaccatgttggccaggctggtctggaactcctgacctcagatgatccacctgcctcagcctcccaaagtgctgggattacaggtgtgagccaccgcgcccagcgtttttttttttttttttaagacagggtctcactctgttgcccaagctggagtgcagtggtgtgatcttggctcactgcaacctccgcctgccacgctcacgcctgccacgccttcagcctcccaagtagttgggactacaggtgcacgtgccaccacgtccagctacattttatattttttgtagagatggggtcttgccatgttgcccaggctggtactgaactccggggctgaggcaatcctcccaccttggtctcccaaggtgctgggagtacaggcatgagacactgcgcccagccagcagctgctttgatctgtgtggaatcggattttgcagtccctctgcttcgtgggctgtgtcctgctgtgagccctgcctcgcccgatccctctggcctcccatgcgccttccacacctttgtggcccctctctgcacgggtggcgtgtagacccctctgagtgccaccgggaaacgctatctctctctcattcctgtggatggccagtggcctcggcccagtcacgggtgaatgggaaacgcccccaccattgcaagccaaggcccggaaccctgcactcagcctgcggcccgcactacggcctggcttcgctctgaggcgctggcacaaggctcccagactctgtctgtcacccacgcatgccctcgccagccctccctgcctgttttcacacttgggacggggatggggaactggagcctgtggggaagggaagcgggacgggtccggcggccccccgcccacctacgtgtcatccgattcgatggcctccccgcgcgcggcgccaccctggatggactccatggccgtggagtagagcgccttctggcccacaggccgcttctcatctgaggtgctctgggcgccctgcgcctgccgctcgcgctcgtgctggtcgatgttgtgcacgcccagcagcaggctgtagtccatgatcttgaaactttccaggacctggcgggatcgggcaggaacacgccacgccgtcagccgtctctatcccccacaacggctcccggaccctatggggttcccagcacggatggccccgtgggctcgggtgtgagagatggagtcccacggccaggcaggagtgggggttctagtgttatcctgaggaacagaggggctgcggtcacacagcggcatcagagcaggccagagaatgggggcttccagcctcacagcaggctgccccgggcactgagacagggacttcccttcctggctttactccttcctgagagacagggagccgggcctatgctctgaccagcccaggcccatgggcaaggacgtgcccggcctgacaggtgacacccaggtgggtggatgcccagggtagcctcaaggcccctgagtggtctgggcggttttctgggggtatgggtcaagttctcaaaggggtcggggagctggggatggtcagcagcggggcctgggtggagttggggagctgggaggtcccaggctctgctcctgacaggctggggcctcccctccttggctccatgcctcgaagctgccggggtgggacggggacgacggagctaacccaggcagaggaagagccgtgcatatcattctttcgctaacacggagccaacgcaggctccacggggacaggagccagaccctcactggacgcacatgggccctcactgtggcctgcagagcaagcagtcatcccatttgatgggtgaggaaactgaggcacagcaagctctcatggctggctgggagctctgggcttgtgaccacagcatctgaaggctgggctcttctctggggggtggggggactctaccactgtcatcgtgtaacctccagaggaaccacttctcagcagtgcagacactcccgacccccaagggctgggtctggggacatgttataagtgttttgttttctttgtgagatggggtctcacaatgttgcccctgctggtcttgaaaccctgggctcaagccatctgcctgcctcccaaagagctgggatcccaggcgtgagccactgtgtccggccacattttaggttaaggccataaaagcttgagcgcttctggatcccacactggggtggggcctgctgtaggctgcagggcaggtgggcctcggcctggcaccctccctggccctgcctgcccaggccgagccctcaccacgcagtcccacctgccaccctccctccccggccggggccgagccctcaccaggcagtcccgctgcagcgtcttgaccagggcgctgaaggtgtcggcgtccagcaggagcccctcgggcatgtcctgcatgaagtccaggtccttgtaggtggggaagctcttctccttctccttcttgctggcgcgccgcttgtaggtggagcccttgaggtcgaacttgaggtgcatcttgaccacgcggggcaggatgttgttcatgaccacgacgcggatgttcttgccccccgactgcacgcagtacagcccatagaacttgggcagcagcgtccgcgggttctggttgaggttctgccgggggaagagggcaagtcgtggagggcggctgggccacagactcacgggggcgggcaaagcaggcctctgcctcagggggctcatggatgcccctggccagcccccctctctccccagaagccctcggggaccccgttcctatgcaggcacccagctggccttcccacggcaccctgactctcatgggccacaactgtgagctccaggagggtctgtttctacagagccaggccccaaggcaggcgcttctgttccagcagaagcttccacactccctgcctgcccacagacatcgccctggctgggctcgcctgttgggaggtctggaggccggaaacgcaatgctgtatcctaaaatacatacatgtatgtatatgcacacacaaacacatacacacacacgcacacacacatgtattttcttgagacagggtctcgctctgtcgcccaggctggagtgcaacggtgcgatcacagctcactgcagcctccacctccagggctcaaaccatcctcccacctcagcctccgaaagtgccaggactccaggcgtgagcccagcctctatgttggttatgctttgcctgtgttgaactgatcaactcagactttcactccaaatctgggtccccaggcgcagtgacgagtctgggtcctgctgtaccctgtagaccccaagcaggcactgggtgactcaggggcacccaagtgaagcaacagcgccccctgcccagagcctctcaatgacgaacccagtgggaagctgcccaggtgtcggggctgagacagacccacagggagaggagtgaggggcgcggactcaggcaccagcctgggcaggctaggtgaactccagcccctgggccgaatccggccaccacctatttttgtagggctgtgagctaagaatggtttttccatttttaaaaagtggaaagggcccagtgcgatggctcatgcctgtaatcctagcactgtgggaggccgaggcgggcggatcacctgaggtcaggagtttgagaccagcctggccaacatggtgaaaccccgtctctattaaaaataaaaattagctgggagtggtggcgcatgcctgtaatcccagctgcttgggaggctgaggcaggagaatcacttgaacctaggagatggaggttgcagtgagccgagattgtgccattgcattccagcctgggcaacagagccagactccatctcaaaagaaaaaaaaaaaaaaaggccaagcacagtggctcacatctataatcctagcactttgggaggccaaggcaggcagatcatgaagtcaggagaccagcttgaccaacacggtgaaaccccatctctactaaaaatacaaaaattagccaggcgtggtggtaggtgcctggaatcacaactactcaggaggctgaggcagcagaatcgcttgaacccaggaggcggagcttgcagtaagccaagatcacgccaatgcactccagcctgggtgacagagcgagactccatctcaaaaaaaaaaaaaaaaaaaaaaatgaagaggccaggcgcggtggctcacgcctataattccaacactccaggaggccgagacaggcagatcacgacatcaggaaatcgagaccatcctggctaacacggtgaaaccatgtctctactaaaaatataaaaaaatagccaggcgtggtggcgggcgcctgtagtcccagctactcgggaggctgaggcaggagaatggcttgaacccaggagggggaggctgcagtgagccaagatggcaccactgcactccagcctgggtgacagagcgagactccgtctcaaaacataaataaataaataaaaaagtggagaaatagaaaatagtctttgatgacacgtgaaagtgatatggaattcgcatttcttggtccataaataatgcgtatgggcacatggccgcgcccatccattctcatgtggtcacagcagctcgctgccatccaggcagagctcagtcctggagacacagcacactggctcgcagagccaaaaacactctctctgggcctttaaagactgagtttgctgagcctgatctaaggagcccgggcccctcgctaagcatcacagagagtggatggaggaggcctcaagggaaactgagtcacaggctgtgctgtgctgcccagggccgggcagcagcttgggcctggcaacatggaaggcgcccacctcgtctgggcgagtaccggaatcccaggcccaggaacactgtggcagccgccggctcctactcctactcccccctcccggggcctgacgcaccctttctgtgagtcatgcgggatgaggggtgggccggatggagctgcctcacgcctgcctgagcagctggtcttttgtggggtaccatctggtggcccatccccctcctctctggaaccctctgagtcacccttgggccccttgggcctccgtggcagctgacagacgctgcccgcaggctgctggttctggggcccacggctcatagggggtgttggcaaggtggggatggggagccaggcaggggccggtgcccacccagccctgcccggggacggcccccaaggcgtgtggccacaggaggaagagagggcggctcctgaacactggtgctggtgaagcctgacgggggacccccgagggtgagtccccgggacccaagatgcctctcaccacgccccaaggatgcctgcttgcccaagccttgcagacatctgctcccgccagccgggagaagggggttgaccgaggagccatctgccccgcagggcgggccacgcaccatgtagtagccagggagcagcttctgcaggaactcggcctccttgtgcatgacggtcttgatgatgaactcgtcgtcgctggtgacgtagaagagggagccactggcgcccgggttggacagctcgatcagcggctcattgcacagggagtactggaagcagaggaggcgggtcagcgggccccaagctgccggacacacagacagcactggcttccggtctgcccaacagccccaggaactgatgacgggtcgctgcattttacagatgcggaaagagaggctcagagagggcgagagacttgcctgaggctagccagcaaggactggagcctgaggccgagctgactctgcagcccgagggctggtctgctagggcgcactccccaggctgcctgctgctctccttaggagcggacacctgatcgcaccggggtgctgacgcgcgtggctaaaaggtgctcccagcacccctgaagctgggtggggccacaacgccagctctgccccatgagtcataagcagaagctgtcaggtggaactcagggaaggctccacagatgggcgacaggcagctggcatacctgcgtatttgcccttctctccttcccacctatttccctcctgagatgctgatgtgatggctggaacctcagcagccacactggactagaaggtaagctctgggatggaagctgcatctctgatgggcaggccccactctggcccctggcaccccacagtccaagcccttcctccccacttctctgcccctttttctcagcccctgctgtttgtttcatgatgtgctcgctgtctctctgcccccacgccctctcctggacattaggcagaaggtccgtgcaggtggaagtttttttgtgtcactgactcgacaggtgctcgatttgctaaggactagaatgaagatgagacccacgggtgctaccctgcgtcttccgggtatggaaccaatgaagtgtgcatggggctaaggccatctgtgtcacgccctttaaaatcctaactggtcgccattggtgtacacggatgaggtcagagccagctccccatcagcggagcaagccaggccccccagggtcaacgctgggtccgtatctgctggacgacagaagggtggtctccgagtgctgcgtgccgcctccaatgctgctgtgataaacaggtggggggtgtccacgagagtcaggagtggtggcgagcagaagcgaggggaggccaggcacggcggctcacccagcactctgtaatcccaacaccttgggaggctgaggaggatcatttgagcccaggagttcaagaccagcctgggcaacagagcgaggcctcatctgtactaaaaaaaaaaaagaaagaaaacaaaaacaggcatggtgatgcccatctgtggtcccagctacttgggaggctgaggtgggaggatcacttgagcccaggaggtcaaggctgctgtgagctgtgacagcgccactgccctccaacctgggcaacagagcaagagtgtttaaaaaaacaccccaacaagtgaggggaaccacctttggaaaatgctggaagagccaggggcttgaggcgtgagttgggtccccagcgccacacacactctgatctgtgaatatgtttggggaccagaggacgccggaaacatgaggtcacatcaggcccagggcctgggaatgccccagtccctccttgggctcaagtcaccacccccgccctgcactgcccgaggtgctctcgggccagggaacggcgccatcagttatcacacgtcggtcaacacaggctggattttgcggagtcagcaacagccctgccaaccttggcagctcagaacagcgagggtccttcctcctgcatgcgctgcttctgccatggcctggctgggagtgatggtgcagggtgagagagccgtgtggggtggactctgaggctggagggagatctgtccaggccactgctgtcgcccagcccagccatctgcctgcctttttctgcccacagccacgagccacaaatatccacaggaaacacagagcccacgcggctcctccgccttccccgccacggcaggacgccctccagcctcccagacacaggcgcagcagcgcagagcgaaggcgggtctctcctggggctggcgccctccctgggaggccaggggaccccgccaagccctgggccgctgtcctcaggtcacccggagcaggggacaccccaagcagccggagtgtccctccgagacacaaatcactgctgcctgtccacggtggcaggagggggaggccgatctcacctgcagagcggaaaacactgtggaaagggcacgttcggctttgtacaaagaacaccgatgacagggaaattctgaagccacatgactaatggcagttgcagggctatggcctccatgggcctcagctgctacggggaagcaggccccatgcgtggatttctgagccaggcagtgccaggacaaccccccacagcctccttcgtcggtgctggggctctcggcagctgcgccgctgaccttggcctcctctccaccctctgctgaccactgggcagggctgagccccaccctgcatcccacctccgccttctccttcctggctgtcctgagctgtgggccttcctggagctaccccccttaccaggggggactgtgacctcagctgtccaatcagagaagcaccggcaacctcgagtcccctccgaaccctacctgtccccactcaagctcaggggccctgtggacagcaacacgcacactagcccgtcctcccgctgtggcacacggccacactcacaccacagcctggacagaggctagggggctgccgcctgctcagcaccggaggcccccaagagaattctcacactcctgagatgagcagaaggattcgggggtcaccaacaccgggctggctccccagatgctgtgggtgcacacctggcctaaggccctggaatgcgatcttatcgggttctaggtgagacccagatggccccagatcggcttttatccgtccactcctgctaatggacacgggtgctgtctctctgctacgagccaggctgctgccttctgttcctggccgcctcacacggtagcgtccaggtcacccgagggccatttctaggcaaaaaccccagctgtgttttcactccccactgccctgccaagctcaggcaaacgctgggacactgaagtccggaggctgggccttggcgacacgacccggagcatggtgactcccgggcacctgaacaggctggagttctcggggcgggggaggggggggtgtcacacgtacccctggctggagcacatgctagttctccctggaagagcgcagcctcgggcgcttcctacagactgagataaaccaaacgcacgcacagtcagcaaccaccaaagaaaggcacaaggaaccgaccaccgcgggtgagggcaggatcggagaaccacaggctcccggccccggggaccgtgctgtcgtgacaaccagaacgccaaccgcacttgtctacagagttccagtcttccctgatacaaagttctcgggatgaccaggcaggcttgggaaaaggccacccggagcttttagaagtggtgatggcgcaggttggatgccggggctcacgcctggaatcccagcacttcgggaggctgaggcggtagctcacgcctctaatcccagcactacgggaggctgagacaggcagatcacgaggtcaggagatcgagaccatcctggctgacacggtgaaaccccgtctctactaaaaatacaaaaaattagccgggcgtggtggcaggcacctgtagtcccagctactcgggaagctgaggcaggagaatggcgtgaacccaggaggcggagcttacagtgagccgagatcgcaccactgcactccagcctgggcgacagagcgagactctgtctcgaaaaaaaaaaaagggggtgctggcgctgatgagctccagggccactgtggggagcaccaccctccaaacacctcttttaggagcccggataatgggctgctaggtcaaaggggttggcctagattttgactttgctaacctgaaacaataaagccatggctagagctaggaggtccgactctacgctggtccccagtggcacccacgtcccagtgccttgttctaacccttaagtctgaaaatgggtcagtcactttggcaccaggctgcagaagactataccaactgtttggtgagtggacaccctcgcctgctctgatgacaaggcccacatggtgaggaatggaggctcccagccaacgccagccaggacggagtcctgcagctgccagtgatgtgagcttggaggccgatctctcctgctttcccggtgagtctcacaggagactccggccctgaacctgaccataaccctacacgaggaacccagggaggctgcccccaaatgcctgacccacagaccctccgagaccctgaacatgttctgtttcaagcctggaagcccgtaacagcaaatatgcttaccaagtaatcatctggccggatcccaaagagctcccggaagtagcggaaggcgacaggtgcataggtcttgaagcggaagtcctggaagtggtgggcgggggtgaggttgctgccttcgctgtggaggaaggacgggaggaaacctgtgaggggtggtgggcacctctcccccacccccgccatggtccctcctagtgcctctagcagctgagcctctagcggctcagctccaagacttccttgaaacggcccaatcccacaagcaacagggggctcccgatgggactgtcccccagtaaccaccctctcttctttcattaacaacggggcccacagtgttggccaggcacatggccgccaagaacaggaccatgccgccccagcctcttgcagctaggtgtgctcacgtgactgcactcagccaatgacacgagtggagcagaaacactggtcatgtccgaaagggaagggctgttgttctccttctgttgcctcctgtggctggaatgcagccgtgatggcaggagctttggcagccacctgggaccactggtcacagagctgtatattgaggatggcggtgtggggtgaccagaaggatcccaggaccccaacaccatggaacctcctgaccagccctgcactgcccactggttatttgtagattagaaaagagctaacttctatcttttctttttcctgttcttaaactgcctttacattgggtctctgattcagcagcaaacaaacgtcctgacggacagagggccagagctcaaggccaaggaggcgccaggaggggccaggtgctgctttcagcagagaagggcgctcaggacaggccactccgcctcagagccacgtgtgtgctgggtgagccctgaggctccgggggcccggcccacctggggaagaagatgctctccaccacgtagaagtcctgcatgagcacgtcgcgttcgggcttggagctcaggtggcccacggtgtagccgatgcccagctggatggcacccttcagggtggaggaggtggtctgcagggagaccagagtgtcagggcccccggctgctccccacgctgccctgcaccccctgtgtgcaccggggggtggagatcgtgaccagctgcagcttgggacccggcacctgccaaccccctcctggtggtccccggggctgcctgtcctgcggctgctgagctgtcgacatcaggccgggggatgaagccaccctccctcgggccacacagccaggacagggctcggctgcaactgccgcaccacgtcactcagccctcccagtcctgttggctagctaggttctaaaggttctcccattttgaaacagctccaacttagcaaaagggtcgattcactgtcaagagtttgtttttagggggtaccatttacagcgagatgcccagatcactttcacatctgcagacgcaggttcccgttagctgctttctatgtaacgcacgtggtcacactgggcaacccacatggccgctatgtgcctcagtttccctgcctgtagacagggatgggcacaatggttctggccctcttgcggacgtggtgtcagctgctgttattatttttatttgtttattttttgagacagagtcttgctctgtcgcccaggctggagtgcagtggcgcaatctcagctcactgcaacctccacctcccaggttcaagtgattctcctgcctcagcttcctgagtagctgggattataggtgcgcgccgtcacgcctggctaatttttgtatttttagtagagacggggtttcaccatgttggccaggctggtctcgaactcctgacctcagctaatccacctgcctgggcctcccaaaatgctgcgattgcacgtgtgagccagcacgccggccccgttattattttttgagacagagtcttgctctactgcccaggctggaatgcagtggtgcgatcttggatcactgcaacctccgcctcctgggttcaagctattctcccgcctcagcctcccaagagctgggattacaggcacgcaccagcacacccggctaattatttttttgtatttttagtacagacaaggttgcgccatgttgcccaggctggtctccaactcctgacctctggtgatcctcccgcctcggcctcccaaagtgctaggattccaggagtgagcctccgcgcccggccggctgctgttatttttgccattggcatcgtttgcattattctcactgtgtgctctcgcgccatgttcactttagccctgggaagccggctcatacctccgctctctaattccggtctccagtgctcctgtcgcaggtgcgaggtggcagggagggaggtcgggagttgggagttggtttctgccactgcccagtttcggcctgtctccctcctaagccacactctgggtggtggggggtctggcctgtatgttcacctccccgagatgccacggacagaacagacatgtgcccaaagataacatacaaacggccctgaagcccgcaaagacgctccatgccactgggcaccaagggaaagcacatcaaaccacaggggggccacgcacctggaatcccggccagtcgggaggccggggtgggaggatcccctgagcctgggagttcaagaccagcctgggcaacatggtgaaacccctgtctctaccaaaacaaacaaaaagacacctcgaagagacaccacctcacacccatgaggacgccagaatcagagacaacaatcacgagtgctggtgaggacacggggacgctgggcctcattcactgttgctgggtgtgaaaacggtaccgctgctatggagaacagtttgcgagtttctcaaaagatgacaccgagttacacgtgacttggcaattccactcctgggtgtctgcccgagacaaacgaacacatgtatccacacagactcacacacacgtgtcctcagcagcacaattcacaatggccaggagtgtgaagcacccgagcgtccatgacgcagcaaaggacaagtgcagcacgggcgccccacgcaccagaacacgactcagccatgaacaggagcaaggctctgacacgggccccagtgcgaatgaaccctgaggacgctacactcagtgagagacgccagacacagaaagccacacagtgtgtgattccacttctatgacacgtccaggacaggctgatccacagacgcaggaaagggatgtgggtgccagggctgggagtcgggatgggggtgactgctaacagggacagagttgctatttgagctgatgcaatgttctggaattagaggtgacggctgcacaactctgcatatgtactaaaagtcatttactgcacactttaaaggctgaattgtacagtatatgaatcacatctcagtaaaacggttacttttgaaaaaacaggccctaggtgggggtgggaacagagtgggggtcaggcttcctaccaacacggtgtgagccaggccagcctcagagtgtcccatccactgcccgaggtggtggtggggtccataacccctctccctcaccagggccgagagcccaggctctgcccgaggtttcagggactcagagccgggcaggcgttgcagccaggctgagccacagaacatgctgcccggccgcccggcaaggacagcaaacagtggggcctcatgcaggactgaggactccagcctctgcctccacacagcccacacctgtccctgggcagaccctggtttgtgtcgggggcgataggccccatccatgctaccagtgggatccccctcccctctgctctgtcccgctccctccagccagctaaggggagccgaggaaccttcttgtaggtggtttcgccggatgcgtccacacctcgatggcccaacttcttcccatggccagggcccggctgtgccgtcatggacagaacctgggaagaggaagcaggaagcgttaactccctaaggagcacgcccaccgggacagggcacgctctgaaaccctgggaagaaaggtttagtcgttgggcccagcaggggtgcacagggcagggggcaggtccaggcgactccggggtgcagcaggaggcccctcacccgtgggcgcctggcgggctggctggggcccctcagtgtcccacactggacacccagaagcgctcactccaaggtggagacctctgcctcctcaggaagggcaagaggattgggcagctccagccctctaattccagggtctcccccaggtgctgtggacactggggctggaccgttctttggggtggggccaccctgggcacagcagggtgctgagcagcattcctggcctccacccactccatgccaggagcacctcccagttgtggcaaccacagatgtccccacacaactctgcaaatgtactaaaagtcactcactgcacacttcagagagtacagtatgcaaatcacatctcagtaaagtgggtattttttaaaaaaacaggactgaggtgggggtgggaacagagcgggggtcaggcttcctgccaacacggtgtgagccaggccagcctcagagcatctcacccaccgcctgaggtggtggtgggagtcgtaactcctctccctcaccagggcccctaactgtgagaccgctgggatggaaggattgaaaagaccaccttgtccctgagggagatggtctcactggccagggtcaggcccggctcctgcaagctgtcgggcagcgcgggtgtcccagcagatgggaccgccgaccccagggggcctcagcttgttgccctcgagggaggatgtgaggaggggccttgggagcctgaagggacacagaggccaaccaaggagaacagccccgcctggcaccgtcatttaaggagcgccactgcgtttgctaggagaccccatggaccctccactggccagaccccatcccaccgctatcagccccagggacacgcctgcagccctgacccctgcccctgccctccctccacagccgacgctgctcagccatgttccctgcattctcccaggtggccgccagggggcaggctctccccaggaattcaccccgccacccgggccaccctccacccgcgccaccctccacactgcccccacgccgggggactctgaggaaggatcccagggtcccaggcctggtggacaaagccctccaagctctggctacggacgcagggccaagggtggcccaggtgggacaggtgccttggggactgctcctgtgaatggggctcatggacaggtgccctgaggactgcatgcgggaagacgggagatgcagcagctcgggtgccctcagaggacggcccaccccactgcgcccactggggctgggaagaaggccactcggcgccacggggctggcagaagctgcaaaggcagggccaacgtgcagagaaagctctcgggaggagacgggcagcaatgacaggacccatgtacatgcagatgtgcacacacacagacaaatatgcacacaggcaaacacacgtgcagacgtgcacacaggcaaacgtgtacatacgcacgcaggcaaacaggcacacaggcaaacacacatgcactcaggcaaacatgaacacaggcaaacacgtgcacacacgcacgtaggcaaatgaacacaggcaaacacgtgcacacatgcacgcaaacatgcacacacacaaacgtgcacacacacaggcaaacatccacacaagcaaaaatagatgcacacacgcacgcaggcaaacatgcacacacacaaacgtgcacacacgcacgcaggcaaacatgcacacacacaaacgtgcacacacgcacgcaggcaaacatgcacacataggctgcacacagcctcactgtgcactacgcctgtgtggctcacagacactgagggcgtgggtgcagctggtagcctcgggcatcgccctctgggcagcgtctaaccctccagccaggtcttccattcctgcccccagtcccccggcgagagctgctctctccccaccgcccaccccccagaatccaggctccacgtggcctggaacccagagaagcccttcctgcccctgcagccctgaccaggcacccctgccactgagggtgtggcccctcagatgcagggccccctcctccatcacggaatttcaccccgacctctcaagacgcagttggtgtagacctcacgttcatcctgcttgtggacactggacggcatttggggcccagagaggtgtagtgagctgccccaggccacacagcttctccgcgagtagggaggcagcaggtcagggtggggaccccaggcccttcgtccgctccagacactcacctctgttggggccgccttcttctgagccaaacctgcagaagagacaagctgggtatcagacaggaaaccggtgacctctgggagtcctgggcccagcccccggcccaccttctggcgccccaggcctggcgtgtgtaactccgcgtggggctggtctcaaggctacacacaagtgaagacatggactgagtgcgctgggaggatgtgatgagggtgggggccactggggcctgccatggtcaccctggttggcagccactggggcctagagcaggggagaggctttgcagcctcagggagatgggcagctggtgacgcctaggcttggcacccaccacggagggcctggggcttggacctgcctggaggaggggaggggaaatagggagcaaacctcccccggctctgacccccttcacacccagacatgaggttctgggcagtcaacaactgagcaggtctgaactgaccaagccccgcttcctcggaggcaggcgccaggagaggctcgggcatggggaaatcaggtgccagcgtggggagtgagggggggcaggcccccgctggggcgagggcaggctggagttgcagggagcgcccagcacctgggcagctgcggtcagtgggaactggccaggggtccccagggctgccgccctccctgcccctctccagagtgaggtttgtggaagggtaagagaggctgcgaggggacccccagccctgccctggctcctgggcccgcagcctccggtcagcgcagcagggcctgggccgcagctccagagaggacaacagaggcctgcaggattgagccaacgagcccaggcctgggctgagccgggagcaccttcctccatgcaaggaggctgggacgaggggagcaggcgagactcagctcctaggacccaggaccacatccccagccctggctcccagcagcagggccctggggtcctcatctggagaacgggaacagactctacagctgtgattacaggccctgagaccgacgggagatgatcctgggggacctgggagcccgatgtcctcacagggtcctcacgagcgggggcgagagggtgagtcagacagagactggaagaggctgcgctgtggctgtgaagagggaggaagggacctgagccgacagatgcgggcgcctctagatgctgggaaaagggggaaacggattctcctctgcagcttgtgctgggcccagccctgcccacagcttgactttagcctggtgaggccccgttctggggctggactcctggcctcggagccctgaggtgggaagcgatgtcagcgactgcagggatcgcacgtgctggcgtccaccatgcaggcctggggaagacctggtctcgccctcaaggggctcacggtcaacaggggtgggcgcagggctgggtgtttgatgtggggtgacaggcggggtgcggatcagcaagggggggcttccctgggctggtcctgtctgagctcagtgccgaacaaggatgccgtgggagccggagggagttccaggcggagggaacggcagcacaaaggtcacaaggtggctgaggcagccacgctgcacggataacagcagcgtcctccaggctcatgcagaggcgggtaccgaaggggagtgcctccctgttggattccgatgctggcaccacccagggcccaggggcatggagacaaatgcttcttttcaatcacaggggctgtgggtcagggctgactccaccccagctctgccagcatcttctcactccattcccccttcctagaggaagaggctgagggttggggaagggagggctggctgaggtctggcagctgggggtgctggggcaggccctcaaaggggattattatgagcccgtggagacactcaggctgcgccggagtgtgtgcaggagggtgcggcaggtgccctgctccgtagggctcggccctctggctgcctccctgctctgggctgggcagcagtgcgttggaactggtctggccctggcttccaggccggctgaggtgagcaggggaggccaggacatgtgaggggccaactgggcgaggttcagggaggtgcagacaggtgaggaggtgggtgcggagtccgcggtgcagacgggggccgtcaggggtggggacccggctgggtgtggactcgggagaggggacagaggagaatttccccgagagacaaaaagtctttctggaccaaggccttacaaagccagcaaagagtgcagagaaggcgggagcccttctgttttatgacgcggaaagagatgctcagagggaggggtgaacccacccgaggtcacacagaaggagaaggaaagtcaaacctgggcctgggtcggcgatgccccaccctatcagccctgccagcgcccctcggcccccatgggcactgtgctgctctcggtgggtgcacgggagacccacgtgtgtcccatccagaggctgcaccccggtgaccgccctgccgtctgaaaacacgtccaccgcgggcactgaaggcaactgaatgcgacttggtggagcagcccatagctttgctctgctgccgggtcagaactgccggagacaagacgaaggcacgaggtggaaaactttgctggggtcaggagcctcggggcaggggcaggccggggaggggcctggggtcaggagcctcggggcaggcagcaggtatggagggggctggggccagaagcctctgcaggcggcaggtggggaggggactgcggtcaggaacctggggcaggcggcaggtggggagggggctggggtcaggagcctctgcaggcggcaggtggggagggggccgcattcgagacgctggtgggcccctgcagtcgtggtcagtccccacgcctgcctgagggtgcggggttggacggtgtccctccgacattcacgtccttccaagaacctcagcctgcaaccgtatttggaaagagagtctttgctgatgtcattgggtaagatgaggtcatgccggagtggggtgggccctggatccaccgctgtccttataagagaagccgctcagggaggccaagatgccgtgtggggtggaggcggggagggcaccactcctccaggccctgaaacgccaaggatgcccggaggcaccaggagcagaggggtgtggagcttctccgaggtcggtcgggagggcagagccctgcccactcctggacctcaggctcctggcctccagagctgagccagaacaaacgcctgttcaaggcctgctgctccaagccccccagtcccggggactttgtctgggcagcccaggacctcacacggagccctccagtgaggaccccagccctgggtgggagggggcgtacttctcaaggcagcaagaacagctgaagggtcctcccctcgggccacctggatgccctgcagggctgggtgggcagcgggtgggccctggagggatctgggggacagacccatggtgctcactgcaggggcggggacggggacggagggagtggggtgactcaggattccggctgccacggtgaagggaaagacgggctgcttctctgtccttccagaggacagggccagtcgcccccaggtctctgacaggccacaaagggcctgctctgggccgcggcggggcggaaggtgctggacgctgacgtgatgtttgggttggcggcccgggagcagaacaattcacggttttacgtccagggtgtgggggaaggaaaagaagagagggcaggaagccagcggtgggccggggcgggacgttccagacctcatcgggggcccgggcgtccccctgctcggcctgtctggggcctccctgcccacagtcctgactctactcgcgaaaccacccctctggggcccccccacacccacttgggtgactcagctgttttcctcagtggccccgatgctgagaggtcacagcgcttgggtccacccctgcccggactctcccaggctccctacggccccgggacccagtggatgcagtgaggccctccagacccagctctgctgacctcaccaggcacctcggggtcacccgtgttgggtgtaggccccctgcctcagtttccctctgtggttccacgtcttcacctgcccgactcacctgagctggctaacggggagaggagaggagaggggcaggcggctcgggccctgctgggaacgtccctgcactgggggcctgtagggttaagggactggccggggccgaagcactgaggtggaggtggagcaggacggagaggggaggcactcggttgggggaccccagggaaaatgtggggctcccagggcaggcaggaacgggcagcaaggggagaccagagccgagtgtcctgtggaggagaggggacggggagaaagcacagccttgctgccaccgcctgcccagggggtgggggcaggtgagcgccatcttcactcaatcctcgctccccatgaggcccgctcagggcacagagcctgccgtgacccccatagggggctgtcatgacggtgagctctgctcagcctgagacgtgactaattatctgctgaatgagccaccccgttttcgaggaaattaggttttaaaaatagtcgggggaggaaaggcgagccgcgctgcggagccgggaggtggcccctctgagcagtttccgctggccaggcccgaggcgggggctctgccgctggggcccctctctcctggccccatcacaggacgtggtggcgacccgggcctgcggtgcacggctctgatcgctggctgcacggtgacctcatcggccaccccacctccctgtgtgcccagggcttctctctgagcctcagtctctctctataaagtgcggctgaagccagctcgagccctagaggcactgccattctccacggggccacatggccgcctctgcacccagctgttccctggcctgcgcctggtctccgccctggccctgccagtgctccctggacactgtgtcccacaccagccacctttgccaccccactgacaccgccccatcctgcagaccagcctggtccctcctgctgagcctgggggctccctcaggacggggcctgccctgggctgacagcatgggcgtgtttgttgactgacccatggactgacagatacccgttcctcttttctctgcacaacaggcctccgccagagcttcctctccacatctgtctgacatggacactgaggcagggaatgactaaactgggggaggaggcagattgtcaggctggctctgcagtgagacccaaagtaagaatggggacggagaggtctggacaggtggccagagggagggaggcatcacagtgagaggaaacagggcacattctgggctcaccgacagggcgccgtggggcagagggcccagcgaggcaagctcgagggtgggtggaaggtgcctcagcccctgtgggcacctgcagggcactgtgacagcaggcaggacaggaacagtggtggcctcatccctgtagaaccaaggtccagacccccatggctgggaggagaaagccccagccctggaggcggtgggggcggggggagagtgggcagggccctggaaggcccaggatgatgaagctggggactggggggctggggactggggggccggggagagcccacggcaggggagggattctgcgaaagggggcccacccaccccgcccccaccgcagacaagggtctccccaggcctcactgcaaccctgcagggtgaagaccaggccctgtcaccccaccagaccctgtgtggccccctccctgccctctgctcctccctctgctccagccacacgggccctcgctgtccctccagcacgccagcgccaccctgtgtcatggcctttgcacgagcggtgcctctgcctggcctgccagtcccaagattccctcacggtttgttcctgtttcaccccagacctggcttgaacatcacccctcagaggcctcctccagccaacctgcaccaaacgatcccctcctcactgcccggcacacggcaccacctgatacatggctgttgtcatccccacaacaggggtcccaggcctgctctgtcacctgctcacagactctggcaaagctctgagggcagcaagggaaggccagtgagaaaggggcggcagtgggacccaggtgtgtcagagtagcacagggggcctgcacccctgggtggggccgctgcccagagggcaactgctgggcaccccaggacaggtgcaggctcgccgtgacacagcaacccgggtgtgtgaggacggcccaggcacggggtcctgcgatcccacaagcaggaagcaaccccgggccagagctcacggtcacctccctcattcgctggaacaacccatcctctggcctcccgccgtgcaggcctccgaccatggggaccacaggcccctctgaggacctgccaggacggccaggctgggcagcggcactccacgacacaggctggggtggggacccggaggcggcagggccgaccctcagctctggtgaggctcagaccaggacccggcggacaagggtaggccgtgcaagaatcttctcctgctaaactgcagaaaggccttctgtggctgtccacagatggctgcgacgcttggcagtagtgtgacttgctctgaccaacagaatgtgatgcaagggatggtgtgggcgtgaggaaggctggcacttctcactgtgcctctgggaacctgggccacgacactcagaggccagctccctgcaaaaagaccgggcggccccagctgttcctgccatcctggctgagggttggacaggcaagtgtaggacgagcttgaatttcctgccactgccgaccacagccatggaactaaccccaggtatgacctacagaagaaccacccaactgaacccaacccaaataacagaatcgcaagcaaatacacagttgtttgaagcttctgtctgggggtggtttgttatacaatagctgactgaaacagatctcggctcactacaacctctgcctcttgggtttaagtgattctcctgtctcagcctcccccgagtagctgcagatcttggctcactacagcctccgccactcgggttcaagcgattctcctgcctcagcctcccccgagtagctgcagatctcggctcactacagcctccgcctcccgggttcaagcgattctcctgcctcagcctcccccgagtagctgcagatctcggctcactacagcctccgcctcccgggttcaagcgattctcctgcctcagcctcccccgagtagctgggactacaggcacgcaccaccatgcccagcttttttgtatttttagtagagatggggtttcaccgtgttacccaggatggtctcaatctcttgacctcgtgatctgcccgccttggcctcccagcgtgctgcgatgacagacatgagccaccgtgcccggcctatctgtggacttctttggaacaggaggagttacagtttttaattcctttgtcttacttggacttcttacattcaaagaagcattaataatctgtacatggattattcagccatgaaaaggagtgaggctctgacgcaggccacagcacggatgcaccttgaagacgtcacactcagtgagagataccagacacaagaggccatgcagtgtgtgaccccatttctatgaaatgtccaggacaggctgatccagagagacagggaggggatgcatgggtgctggggctggggagggatggagagtgacagccgccaggcgcagggtttgctttcggggtgatggaaatgtactagaattagtggcagtgactgaacaactctgtgaatacgccgagaagaatttactcagttgcaataagtaagcagtaagacactttcaaagagtgaattttgtgtcccagaaaagcaaaatgaagatgcagatccctttagttgcaaaagcattgcccagtgacatacaccatctggaaccttctccaaactcggtcatcccccagggcctcagtttgcttgtctctaaaggaggttgggggacttggtcaaggcttgaccagaagggcagccagtctgctgcaggctggagcttctcacactgtctgtgctgtagaactgagttcaacctttcttttctctccatcatggaccaaggcttttgtgaaacgcagtaaacagcaactaccgaggtctgaaaggctggtgccgaccctcagcttctgctcctctctggtatggaccgggatggacagtctcgtccatggtgacatcaaacggccctgcctcaggcctcttctctcttgatatgagtgtacccacatgcaaacggcttgggggcctccaggcaccccccaaagcccatgcaaaccaggatctcccccctcagcacttagggctggattgttctctgggctggtcactggggccgtcctgggcactgcagggtgccgagcagcatccctggcctccacccactccatgccaggggcaccccccagctgtaacaaccacagatgtctccagacatggccccgtgtccccaggggggcaggatgaccccaggtgatgccccgcttcagtagcccctgaggttaaacccttgggtgagatgttcaacacggctgcaacagcaaatatctgcaccaggtgccgaccaagctctccccacacaggatcccacccagcctgaccaggcagccactcctcacggcttcatttgacacatggggaaaccgaggctgggagaggtggaaggattctgacaccgctggggagaacccatgtggccaggcctcccgcgtgaccgtctctaacccatacaggcctggcatggtaggcaatggggtccctgtttggggacaggcagcacccgactgatggtccccaccgggaagtgatgagagatgtgaactcaggtacctgcccggccctgcagccccaagcccagcgagtcgccgtaaactgtcacccggtacatccgcggtccccggcacccaccactcccagcacaccctggtgagtggcccgcccgggcttggttctgagccctgcggtgtttgggttcggtcaactctagaaatcacaatgttttggagaaaaacctgggtttctcgaaaaacaggcagatctagaaataaaaggctgcaccatcactcggccccccgcctggcacactcgcctctgccttcgccccccacggcccactccccgacggcgcgtggccaggaggcgcctgtgagcacctgatccagctgccacctaattcatgatcaccgtttgacaggccgggaaatggggatttggggaaatttaggaagttacccaaagtcaacggtgaaaaacgctgtgatcccatctccgaatccagaaaaaccttcaacgaaattcaacatgaatttcacgtccccccaaaatactaccaagaaagaaaaaaaggagagaaagggagactgcttttactttaaaaagaaatataagaccaggcgaggtggctctagcactttgggaggctgaggcaggaggacggcttgagcccagaagtttgagacttgcctgggcaacatcgtgagacccccatctctacaaaaaaatttaaatattagccaggagtggtggtgcacacctgtatttctagctacttgggaggctgaggcgggaggatcacttgaacccagaagtttgaggctgcagtgagctatgactgcaccactgcactctagcctgggcaacagagcaagatcctgtcttaaaattaaaataaaataaaataaaatataaaatgaaagaagtataaagcaaaaagttatgggaaatgccttaatgtcaaccacaagaccaggggtgtggctgtgagagccgccactgcagcggaagtgctggctggagcaataagactagaaaaagagaaaggaatgaagactgaaaagaaaaagagaaagttttaggccaggctttacggtggctcacgcctgtcatcccagcactttgggaggccgaggcaggcgggtcacttgagcccaggagttagagaccagcctggccaacatggtgaaaccccgtctctactgaaaatacaaaaattaggcgggtgtggtggccagtgcctgtaatcccagctacttgggaggcggaggcaggagaatcgcttaaacctgggaggcggaggttgcagtgagccaagatcatgccactgcactccagcctgggcaacagagtgagactccctctcaaaaaaaaagagacagtgagtccagttcaagatgctgaatcgtgttaagtgttgacaggtgggggtgctgaggtctgcaactttgaaaggcttccaaaaaacaagctgagagggatggcggaatggagggatggtgggatggagggatggaaggatggtgggatggagggagggatggaggatggaggatggagggatggagggagggatgcagggagggagggagggatagatggagggatggagggagggagggatggaggggtgggagagggatagagagagggagggagggaggggagggagggagggatggaggagggatggagggataaagggagggatggagaatggagggatggagggagggatggatggatggaggatggaggaatagagggaaggaggatggagggatggacagatggagggatggagagacggagggatggagaatggagggatggagaatggagggatggagagatggaaggagaatggaggatggaggagggagggagaatggagggatggagagatggagggatggagagatggcaggatagaaaatggagggatggagagatggagggatggaggatggagaatggaggatgaagggatggagagatggagggacggagggatggaggatggaggaatggagaatggaggggtggaggaatggagaatggaggggtggagggatggagggatggagggacggagggatggagggacggagggatgcagggacagaggcatggagggatggaggaatggaggatggagggatggagaatagatggatggagggatagagatggagtgatgaaggatggagggatggaggatggagagatggaggatggagggatggaggatggagggatggaggagggatggaggcaaggaggatggaaggatggtgggatggagggagggatggatggagggagggatggagagatggaaggagggatggagggagggatggagggataaagggatggagggatggaggggtggaaggagggatggagagatggaaggatggagggagagatggagagatggcgagatggagggatggcgagatggagggatggcgagatggagggcgggagggatggagggatggcgggatggcaggatggagggagggacagagggatggcgggatggcaggacggagggagggatggagggagggatggagaatggagggatggaggatgaagggatggcaagatggatggagggagggatggagggatggcgggatggcaggatggagggagggatggcgggatggcaggacggaggaagggatggagggatggaggagtggagggagggatggagaatggagggatggaggatgaagggatggcaagatggagggagggatggagggatggtgggatggagggatggcgtgaacacagccaactgccaattgcaagacccaggcggtaagtcgtgggtctactgcccaattctttcaacttttcagcacttttgaaaattctctttaaaaatccctttcccccaggggaaaggtgagtctttaccttggacacaggtgttttcaagctctgaagaaacacggtttttgagggaactctgcttgaggaacctgagtggggacacgggtcacagaggatgcccccaagctccagtgggccgggccctgtgcccaggctccccacccagcaccacacctttgaggggcatgttcctgcctcaggggccttgcgcgtgctgcgcctgtgtccctgcttggccggctcctgtcctcccgtttgggtctcagcctctcacctccccagggagaccgtcctcacagccaccttcctacccgccttgcatcccattctatttcctcacactgcacatcagttgggactgatcttgctccttcctgtgggagcacagacctggcgtctcgttcacggttgctctcccagacctactcgctactcagtaggggcgcagcagcaccggtgaatggagctggggcaggcgggctgggctggatctgggagatccagaggggtcctcagctgtggagggggagcactggagaggacgtgacctgggacctgggctcaggcacacagtgagttggctaccaagatggggcatcaggaagaagcacaggcttgggtcagatgtgctgagcagtcaggacctgcagggttggaggggcccaaggggcgccctggatgtggcttgacgtgctgcgctgggcacgcatggtggacggagtggtggagcaggcaactggagcctagaacgtgcccggcatgttgcagacgctcaagaaactttctgcagcaaacgaagaggcagatgctgtgggagacactgcccgggctatggtggggtttgggggatcccagctcctgccctctggccctgtgagaacaccctggctacagccccctcggggggacgtggcaaaggcctgaagccccacaatcaagcctggaacaatggccctgaagtgactacaggctagttcttaccctgaagatgcactctcttctgattctgagactcccagcgtggtgaatggtgtcaggtgattgtctgttggctcgttcatccgttcatccatccatccatccatccatccaaaccaaaatcagcaagcatctcttgggtttgggggatgacacaccactgaggcggccggctctctgtctaaatgcaactgtcttttcttttttcttttgagacggagtcctgctctgtcgcccaggctggagtgcaacggcaccatcctgactcactgcaacctccgcctcccaggttcatacgattctcccgtctcagcctcccgagtagctgggattaaagggatccgccactattctcagctaatttttctatttttatagagatggcgtttcaccatgttggccaggctggtctcgctcctgacctcaggtgatccactcactttggcctcccaaagtgctgggatgacaggcgtgagccaccgcgcccggactgtctaaatacaatgtctaataagaaaaggttttaagcacctggaaagcacagaatcacataaaagacacccatctattactacataggtcaaaaaacatcttttctgtttatcccttaagtcaggggtcagcaaacttttgtaaagggtcagaggagatcaggcggaggccaggatctcctctgggacaggctttgagcgtggccctgggggtggagggagtgaccgaaatggaggtctcaccaggggagactctgccctccagggcacactggttgatgtctggggccatttgtgattgtcatgactaagggtgctcctggcataaagtaggcggaggccagcgacactgctcagccccctgcagtgcccaggatggccctaccccagagaaagatcaggtcccacaggtcggcagtgctgagaggcagagaccctgttttagagactgggatggtagaatctcgcccctgttcgccccccgcatctgcacacacaagaacccggagtcaacacagtatggaggtatgtgggatgggagtgggggcgggcagggtgttcctgacactattctccgggtgtgtacaatgtttcaggaaaagaacacccgtacctgtaccaccctgtccacttttttttttttttttgagatagagtctcgttctgtcgcccaggctggagtgcagtggcatgattttggctcactgcaacctctgcctcctgggttcaagcgattctcctgcctcagtctcccaagtagctgggattacaggcgttcaccactaccacctggctaatttttgtatttctagtagcgacggaattttgccatgttggccaggctgatctcgaactcctgacctcaggtgatccacccacctcggcctcccaaagtgctgggattacaggcatgagccaccgcgcctggcccacttttgtcttttgtttgaagttccctgtaataaaagctgcagctcgtacacacatccccccgcgggctggtgctctgcaagctgcgtctctgaccctctcaatgctccatgaggtgactggcattggacctattttacagctatgtaaactgaggctcagaggtctctgctagtcaaaggcagcaacattcgctccagcctggacttgaagggcaaacggcagccccagggcagcccctgggggagggcaaacagcagccccagggcagcccctgggggaggagcaaacttaaggcacattcttcagataaactccagggggtcacttagccaaacgagccctggggcctgcgtttggtcctctggcccctcaggcccaccaggatccaaagcgaactccttccccgtcagcctggcgtgtaggaatatgcttccacgagcccagattgcagagcctgctgcacgctgcatgctggtctgaccccgtcaccacccccaccaatagcacagagggagacaaagagaaggtgcctaacatttcttagaaaaggcatcgtgggccaggcacagtggctcactcttataaacccagcactttgggaggctgaggcgggtggatcacctgagatcaggagtttgagaccagtctggccaacatggtgaggccccgtctctactaaaaatacaaacattagccaggcatgggggtgcgcgcctgtaatcccggctactcaggaggctgaggcaggagaatcgctcaaacccaggaggcagaggttgcagtgagctgagatcgcaccactgcattccagcctggacaacagagcaagactccatctaaaaaaaaaaaaaaaaaggcattgtgggccaggcgcagttctcatacctgtcatcccagcacacttggaggccgaggtgggaggattgcttgagcccaggaattccagaccagaccgagcaacatagcaagacatagcaagaccccacctcttcaaaaaacaaaaaaattatctggcgtggtgacgtgtgcctgtagtcccggctactcgggaggctgcggtgggaagactgcttgagccccagagttggaggctgcagtgagctatgatggtgacactccatttcagcctgggtgacagagcaagactgtccctataaaaaaattaaaaaaataaaaaataaagagcagaagctctcttggaagcggctcctccagccccagttgagccttcagaggaggcagtcccggctgacagcttcaccacagcctcatgagagaccccgagccaggaccacccagctacgccgctcccagactcctgactcagaaactgtgtgaggtcacagatgttgcctcaatgaacgtttgctggacagaggcccagatggagaacacctcccctcctccccctcccctcccctcctgtccttcccctccctcctctcctccccctccctccccacaccaggcttggtcctgccctagggcctccgcacaggctgcgcctctgcctggaactctctctcccacccaaccttgttcaggtctagatcaaatgtcacctcctcagagagtcccctccctggtcaccctgcccccgctgggtttacttctctctactccttggatcctccacatttgttccctctgaggccatgagcccggccagggcagcgacttcatctttcccctctgcaacagtgcagacagcacgagcctggcacgtgggtaaggctgcctgcgacagtgtcctcctcccaggagttccacggagatctgggtccagggcacagtgggcttggctcaggagggaaacggggttggatggggtcaagagcccaggggcgcaggctgcttcccgtctctaaccactgagccaccctggaacagctggagcgcaggcaggagctggccagagacgagctagcccaccttcgccgtgtgtgtggcggggcccgcaccatatgagaaccccatggcttagtcacgcaattgtcccaacaaccctgtgacgtaggcactattactgctcccattatgcagaggcggaaactgaggctcagagaggtcagatcgcttgcctgatcatgcagcaaaaatgtaggggtggacgcacctgattccaggatgtcaggccccagtctgcgtcaccacagcagggacgggaggagagtgaggaggagccaggcgggggaagggcagaggggcctcccaggcagaggcacagccagtacggaggccccggggcaggaccgtgtctggagagctgggatcagcccgggcacagcaggaacatcctgtgcagagcacagccagcccccgcttcccctcccgggcagtcccacacctcccccacactggagcccctgcttcccctcccgggcagtcccacaccccccccacgctggagcccccgcttcctctcccgggcagtcccacacctcccccatgttggagcccccaccaccccgaccagtgctgactctgtctctgcagcaggcccggcccccagcacaggagaggcagagcagatgcttcggtgcctggagcagcacccacagcctcctggctgggaagtggcctctgtgtcacccactggacctcaggattcctcaaaataaagacggaacgataagaagagcctcccgctcacagcgctgcagtggtaaccacaccagtcacgcatgagcatttctttgccttataattagaggcatcaagatgagctcattgccgccccctcaccccacacacatcatccagcgcacaatctcacagcactcacacacagatggggacacctgctgcctgccagggtcccttccatcccggggacagggccgaattccttccccttgaaagtgggcgggtctcaagccctgctttggccaatcacatgatgcagaagtgacatggggggaattcttccatcagcctctgctctcttggaatccctccagtacgatgctggggccaggctggagggtggcagcaatgcggagagaggcctgggacaggaggccaccagggtgtgctggcacaagccagatgccgcagcagaaccgacctgctgagcccagccaagcccagccaatactgggaaactgacagcaaaagcactgcagcgtgaagcctctcagtgtggcagtggtttgttgcataatccacgaatcccaccacagacgcacccagagcgggaccaccacctgctgaaggtcacccggcacgtagggcccaggcagcaaagccccgggcggctctctccctctgagcaccaggatctggttccctgtgacccaccaggagaactcaagctcttagtgccacatggcttccaccactgtagacacgtcactcagcagtcagggccagacacgtgaatcttagaaggttccaagttatttctgggtgtgggatgggggagggtctcttaatttgcaacttccatcctttggtgccgtctgaaatacatattttgtcatttttatttatagaaatgaggcttttctcaaagcattaactcactcaacttgtaaaacaggcagaggaaaagaaaacaaacagtgtgaacatctgaaaaagacgcccagacccctctaatgataaaagacatgatatgaaaccagcctgccagcaatgggttggggactcagggggtcctcacacggctgggggtgatgcccgtgtcaatagattctcccctagggggcagcctggcagcatttctaatgtgtgtgcccttggcagcaacttcaattctagaactttctcctagacaacttcggcacaggtaaaaagacaggagtctcgctgattatatggaactcataaggtcctacaaagactgtctaaagcaggggctggtataccacagtccaggggccgaacacagcccactaaagaaagttttattgggccaggcacggtggctcatgcctgtaatcccagcactttgggaggccgaggcgggcggatcacgaggtcaggagatcgagaccatcctggctaacacggtgaaaccccgtctctactaaaaatacaaaaaattagccgggtgtggtggcgggcgcctgtagtcccagctactcgggaggctgaggcaggagaatggcgtgaacccgggaggcggagcttgcagtgagctgagatcatgccactgcactccagcctgggtgacagagcgagactccgtctcaaaaaaaaaaaaaaagttttattggaacatggccacacccatgtgttcacgaattgtctggctccttaagtgctacaaccgcagtgtggaggagttgtgacagagaccatctggaccacaaaccctaaaatgttcatcttgatttttttgtagagacggggtcttgcactgtcacccaggctggaacacagtggtgccaccatagctctgcagcctccaactcctgggctcaagcgaccgtcctgcctcagcctcctgagtagctgggactacaggcgccaccacacctggctaattcttttttcagaaacgggggtctcgcgttgttgccgaggctggtctcaaactcctgggctcaactgatcctcctaccctggcctcccgaagcactgggattacaggcgtgagccaccgtacttagactaaaagctaaaaaatttactactcagccctttacagagtttcctagccaggcacagtgactgacaccggtaatcctagcactttgggaggccgatcctcccaaatacaaatacaaaaattagccgggcgtggtggcgggcgcctgtagtcccagctactcaggaggctgaggcaggagaatggcatgaaccagggaggcagagcttgcagtgagctgagatcacgccactgcactccagcctgggcgacagagtgagactctgtctcaaaaaaataaaaataaaggctgggtgcagtggctcacgtgtgtaatcctagcactctgggaggccaaggcgggcagatcacctgaggtcgggagtttgagaccagtctgaccaacatggagaaaccccgtctctactaaaaatacaaaattagccagacgtgatggcgggcgcctgtaatcccagctactcaggaggctgaggcaggagaatcacttgaacccaggaggtggagcttgtggtgaaccgagatcgcaccattgcactccagcctgggcaacaggagcgaaactccgtctcaaaataaataaataaataaaataaaataaaataaaataaaataaaataattacaaactggaatgaatgtaatagctaaaactataaaactacttaagaaaatggggtaataaatctttgtgaccttggattaggcaacaatttcttaaataaacaccaaaagcataagcaagcaaagaaaaaaacagatcaaggccaggtgcagtggctcacaccggtaatcccagcactttgggaggccgaggcaggtggatagcctaaggtcggcagttcgagagcagcctggccaacatggtaaaaccctgtccctactaaaaacacaaaaattagccgggcatagtggtgcacacctataatcccagctactctggaagctgaagaagaagattggcttgaacccgggaggcagacgttgcagtgggctgagatcatgccactgcactccagcctgggtgaaaagagtgagactccgactcaaaacaaaaacaaaaaaaattagccaggcatggtggcacatgcctgtagtcccagctactcaggaggctgagataggagaattgcttgaacctgggaggcggaggttgcagtgagccgagactgcgccactgcactccagcctgggtggcagactgagactcagtctcaaaaagaaaagaatttaagaaagaagtccaagtgtgcaataaggaatatgtcccaacagggcaggaaaggaagaaaggacccacaggtgcagggagcggtgagggcctgtgggaaggggacacagacgcacatacacgcacacatgcacatacatgcacacatgcacacgcacacacatacatgcacacatgcacacgcacacacatgcacacgcacacacatgcagatacacacatgcatacacgcacacacacgcacaggccctcagaggacaccacagaacacctgcgggacacagcaaggaaggggtgaggtggctggaggggagggtacacctgggggaccccagcacggtggagggacagcctggggtccacccgagtagtaggccgcccctcttccttgccccttctcccttctccctgccgggtgctccccgcagggcatagagtgatcgctttccccgcagcaggtgggcgggcaggagccaggccggtaaacaggaagctctgcgcaggcgggcggagcatccagaactccgcaggccctgaggtgttgggtcgtttcccagggccccaatgtccagggagaaagaggctccactctcagcaccaagctcccgggcgggccggggcaggaggctgtggggcgtggccagcccgcaggtggcggggccgacgggatgggtcagggtgcacagagcacacgccagcccctgggggaagcccggcccgtgcgggctgcgggagatcctgatgggccccgagctgaggctcccgcagccagggtctgcgcgtggtccccacctccttgcgcgctccgtctccagcacagcagaggtggacgcccctcgcggctggctccccagcgtccctgtcctccaggggcgcagcgtccctccggggagtacagtgtccctgaagggaattccttccagagcctgaggttaggccgtggtgggaaacagagcggggtgccgcaggggagcccgcaggagctcctgttcctcacctgcgagggggggacggcctctggccccctgctgtgggcggggagggatctagaagaccggaaggctatttccagggcagcacccccaggactctggggcacacacgtccccaggcagctccggtgaggccaccctcgccccctggtttcaactcctgctgtgagcacctggcctttccctggtccactgagagccgcgtgtgttttttgcggttttgctggtgattctgctgctgaaattgcccccccaggcattgtcctcaggtggtttcgtgtccctcagggctagagacccggatgagccccatggagaaacccgtagtgagagaagctttgctcaaacaggactgagagcggaaagagagagagagagaggagagtggggggagaacgagagcgagagacacaccgagctggtgggccgggggagggggacccacacccacgtcgccatggccccccaccccgtttttgagcccccacacagccgaatacatgcccccggtcccccttccagccttgtccccaacacagcctgcaaatgggcgggggcctgggagagtgcccgggatggggctggggggtggggggggcttggcgcacgcggcctatggtctgtgagctccctgtggataaatcaacaacacgggtgtctttaaaattttcttaggatctcactctgtcgcccaggctggagtgcagtggtgcaatcacggctcactgcagcctcaaactcctgggctcagtaatccagttattctcccacctcagcctcccaaagtgctgggattacaggtgtgagccaccgcacccagccctaaaataacacgccttgaaataaaaacgaacatacaacaaggtcacgtatcgactggctgatggaaacatcatgcccagaggctcacaggaacccgaccttgggtttcccctggagccagggctcagtgtgcgcctgaagtgtctgcagcagcttcacaaaggaactaccacaaacaggcctggcgcagtggctcatgcctgtaaccccagcactttgggaggctgaggtggctggatcacaaggtcaggagttcgagacccacctggccaacatggtgaaaccctgtctctactaaaaatacaaaaattagccgggtgtggtggcgggcgcctgtaatcccagctacttgggaggctgaggcagcagaattgcttgaaaccggaagacagaggtttcggtgagctgagatcgcgccactgcactccagcctggacgagagggcaaaactccgtctcaaaaaaataaaataattaaaataaaataaagaactaccacaaataatggaactggctgcttcaggcagagaggtaccatgccagcaatcaacacgcaaatggcctgacataatcacacacgcacacgctaacacacacacactaactcacatgcactctcacacacacaaacttgcacacactaacgtacactccccccccacacacagaatgataaagacatggcaaaacgttagcagctggtggatctctgtgcgggctgtacaggtcttcactgtagcattcttgccccttctataggctggaaagctttccaaataaactatttttaatagcctaatataatctgagccccaagtgtatgggccagagaaacacctggggtgacagtcattatctccacagagatggagagggtgaggtgggactcactttttactcactgcaagtctgattactttttttttttttaactgtgaacatgttatcatttgttcaagacgagacatggctgtagcatgaaggtaaaggcagaggagtggagcagaataaaaagtccagaaataggctgggcgcactggctcacacctgtaaccccagcacatcgagaagccaaggcaagaggatcacttgaggccaggagctcgagaccagcccaggcaacatgggaagaccctgtctccataaaagatgaaaaattagctatgcatggtggcgcacacctgcagtcccagctagttgggaggctggtttgaacccaggaggtcgaggctgcggtgagctacaatcgtgtcactgaactctagcctgggtgatacagcgagaccctgtcttaaaaaaaaaaaaaaagaattgaaatgtgaacaaaaaagaagctaagttataaaagtcttagcagaatttaatcataacctcagaacaggaagactttcccattcatgacaccaaactaggaaaccagaaaaggaaagagtgataagtttgaccacataaaccccaaaatacctgccagacgttaacaatcatcgtaggagaagatgggcaaagaagtacctgcacttgtgtcaccaataaatgagtagctgccataacaaataaagagctcctacgaatcaacaaaatggtgacagataactgtagactgggaaagacacaatcatacaggtcccagaaaatgaggtcagagttcaacctgacgtgtgtgcttacaagaaggaactgtgcaaggaaaatgggccggggagggtggaggtcggggccacggagcttgcaggagctgaggcagctcagagccagcctcggtggtgaccccgtctccctggtggggacactccattttccagctcttgatagaaacacaggtgaccgtcgggaggagtgggagggagctcctgtgtggcgagtcccttcgcctctagtggtctctgctccccttgtggaaacgcagttccaagaaaacaaagaggaaatgctgcgaagagccacaaggactttttctctgagtcacaagaagacgaatatacgctgcaatgacgcagtgagggaagaagtcgccttgcacccatatggctgctgaggatgggagagatggacgcgtcctccgctgccggaacacggagcgcccggtctggtacagtgctgatgctgcgttttgttttctggattttacgacatcttgggggcctcgctaatctggggatgacggccccttccagggtaagcggattcctaaacgttgcaaacggcccgcctgcgagcacactgtgacgtgcagagcaaccaaccgcgagcccacgcacctgatcaaactctcacgcgccacgcccaggttccctgccctgaatcaccccagggccagctcccagaacagggaccaccccaacagccaagagccgcaaacagtcgggagtcaaaccagcccatcctaggcacacccagcccatctaccccgcctggcccgtcccttccaaccaaagcctcgggaactgtaacacaagagcttttcaatagcagtcacctcctgctctcttggcctcaccaggcctgatttaaaccaatcagagtgcatctgaatacacgtaccacctttctgggttacagaagcatagagcctttactgcactgggggtgacagcacctccgtcaacctgggatctgagagatcggggagcaaaaccaccaaagcccccaacacaagcgagaaatgagcctctgggatggccgggagagtggggatgtttgttttagcagcagacgccaagccaggctggctcatacgcgcccacaggcacaggccccgaggcagctgctcccaccccaggctcttttccctgccccagcagccccgcccatgtcagcgcatgcaccgtggccagtccaagcaccgcacgggaagggtgcacagtgggagctgcccgctcacgtccctgtccccactccctgggcgcccaccatgggcagggccggctctgagccttttgtgtgcattgactcatctaatcctcaagggacattgctttccaaatgaggaaactgaggcacggagcggctgggcaaccgaacccaatcatctcagctgtcctcctgccaacagcacaatggaacagagacaccgtccactgagcacagccaccaccagggtcccgacggccccacccagtcccactgccggctcccaccacggcccccaacgctccctacaggggctcctggggcctccctcgcagctcggccatgctgggccccggcggcccccatgctgcccttcctgcatccatcttggctgagggcagctctgtccttccagggctcaggctaaaatcttgatttcaaactcaatcccccctcagccccacactcaaccttcaaaaggtcctgctggctctgcttccaaaatccatcccagatggcgcactgctcatggtccccacctggcccagccccagcttcgcccacctgggccagtgcagtcccctctgccctggttcccctagcccacgtcccgccctcaccccatctgtcctccccacagcagccaccagggggtgcctgtgagctcctgagtctcgcccatccctcctctgcccgcagccctccatggctcccacctcccttggggtcaaagcccaagtcctccctgcagcccacaaggccctgcacaccctgccccgtcccctccctgccctcccctcctcactgttcctctaaaacaccaggcgtggtcctgccccagagcctttgcacagtgcctctgccagacagctccctccacacttccacaaccccctcacttcccctggatctctgttcaagtgtggcccccgagtccccagccttgagggcacctccgccgccactctctcccctcctctgctcggctcttctccgtggcacttgtccactgcgttgcgtgttttgcttttctttgctgtctgtatgtcctggccccactcccagagttccttagggggcctggccctctcgttcccccaggctcccagcacccggccacagcacacgcaggaaagcacacgtagacgatgcccgaaccacaccccactcccggaaaccttcagcagcagccctgcctgcaaagtggaggcatgaggcatttcagtggaggagagcggccgggcagggtgctggggtcctctcttcactcagccagaggccgggtcccctcgcacccccatgccagctcaggcacctgggggccctcatgctcgactccagcccctcccaagctggcctctcagggtggcggggaggcaggtgcaggggctccgagctaatcccctcaggctgtaatccccatgagtactggcaccaccacgggccccgtccagctggcgcctgctggcaaatccttgcagggtcttgaccggcctggtcctgcgtgaagggacatgctgccggggccaggcggcaggcggcaggcggcagggaggcctgggccccgctcctcgttcacagccccaccctgtgtggactctccagccctcctggagcctcggtttccccatctgtaaacaaagacccaggtcgtgcagcttcccaggggctagggcctcacccatccctgtcctgccaggcactcaggacacccgcagctcttgttccaaaagggaaagaaggggccaccatgggggcgcatgcctgtaaccccagcactttgggaggtggaggcaggagggctgcttgggaccaagggttcgagaccctcgcaccctggacaacatagtgagacctcacctctacaaaaaagttttaaaaatttaaaagaggctgggcgcggtggctcacacctgtaatcccagcactttgggaggctgaggcgggcggatcaccaggtcaggagatcaacaccctcctggctaacacggtgaaaccctgtctctactaaaaatacaaaacattagccgggcgtagtggcggacgcctgtagtcccagctactcaggaggctgaggcaggagaatggcgtgaacccgggaggtggagcttgcagtgagccgagaacgcgccactgcactccagcccgggcgagacagcgagactccatctcaaaaaaaaaaaaaaaaaaaaatttaaaacaaagggaagtcacttgctcagaggcacacgggtctaagcggccaaggcaggctcagcccacaccaggccctgggaccaccctgcccaggctcccggagcctccacctgctttgggggtccccactgcctgctcaccccacatcggcacacacctgccacagtgcctgggctcccagtcctgctctgtcctcagtcctcgccaccccagccaccagctccagggcccaggccaaaatccttccaggcccctcgtctgcctccaggcaccggtggcactcacctggacacctgccccaaccccacagagcactgcccacggaccatcccccaccaggcgctgtgaatcgggctcgccgccccactcagatgcccgtgccacccgctgtcctcaggtccgaccccacgcgaccctctcccaccacgttgacttcacttctgcggctcaagtgggtgcagcaagttcccaccccacggcctcggcgcgactattccgctgcctacatcgcctgagccacagcccacccttattcagctcgtggggacagtcacctccctccgagtcctcagctgccgcaggcctggccacttgacctcccaggtgccctcaccacactcatcaccgcccaacgcagcccggctctgggctgggcaaacatcttccgtaaaggaccgggcagcaagtgttttcggcttcgtgggacacgtagccccaagcatggccactcagctcccagctctgccgctgcagcgtgggggccaccaaggccggcaacggaacaaatggtgtggccgttgccaataaaactttgttgacaagaagcggcatggacagattcgggtggggtctcacgtggccacttgttcccatctgcagcctgacgcccagcaacctgagggctccaaggggtcagcgaggcagtcccgttagcaccagaagactgggcaccctgagccccacctggcccacacgaggtgctcaacaaaggtctggagcccaggagtggaactcacactttcacgagccgactcccatggcggaccccagcgcccaggtgagctcgcttggcacctgggccccggaagcagcacacgaaggggactccctctcctccaacagcaacctgggacggagggggcacccagctttctcacggggccggctgcctgtcccgtgccttctaagggctttaccccatgattctccatgcagcccaggagaaaggcagccatcacgcccactttacagacaggtacaccgaggctgcacatccccggctggcatgcaatggcgctgggtgtgaacccaggagggccggcccccgaggcctctccactgggacacccaggctgtggtggtcacagtgcctgacctgcatcccgggaggcggccagggcgggagagaatggggaactttccgtccccagtgtcctcagcctccgcctgggccctgctgacttgcaacaagagacaccacaatcccactgacccttttttttttttttttttgagatacgattctgctgtcacccaggcatgcagtggcacgatcacagctcagtgcagcctcagcctcccaggctcaggtgatcctcctgcctcagcctcctgagtagctggaactacaggtacataccattacgtctagctacttcttttaatttttttttagtagagacaggggtcttgctatgttgctccaggctggtctcaaactcctgagatcaagtgatcctcctgcttcagcctcccaaaatgctgggattacaggtgtgagccaccgtgcccggcctccctgacctttttacacagaccaccacagctacagggaggccctggtggcggtgctgactccctgcccggccgccctgtgaccacactacactgtgctccaggcaggcggggcctctgctggggccatgccctcttcctgcccaatgcccacaggtctccctcggatgccaccttcttggcaaggccttcccagccaccccattctaccttacccttcctccctggcactgctggcctcatgcacctgatgttcaccaggatctgcactgtgctgagctcttccgggcgcaggggatgccgcaggagtggcacagacggtcttggccctcgtggagctctcgctcaggaggagatggtcagaaaacacgtcagcagagccatatgtttcaggtggtgacaaacgctatggtggcacaatcagggaagaggaaccgggagggcaggggacggagaaggggagaccgctgtgtggtgacagcagggcagggaggcctcacggagaggagatgctcccacaaaacctggaaagcgctaagggagcaaaggacacagatgggaggaggggcattccggggtgggggtggggggcagccgtgcaaaggccccggggcaggaccatgccctgcatgctggaggaacagcaaggggcccatgggcctacagcagagtgcagacgggagggcagggagggcagagtgcggaggggagggcagggagggcagggagggcccggggcaggctgtgcagggcctgatgggcttcaaagaggactatgtctttgaccccaagggaggtgggagccatggagggctgcgagcagaggagggtcgggactcgggccgctggtttttaatggggtcctcctggaatgtgggacagggagcagaggaagagcaggggcgccaggcctggctcagggggcaaaggaggactgagctggaccgaggaggactgagctggacggaggaggatcgagctggaccgaggaggaccgagctggacaaaggaggactgagctggaccggggaggaccgagctggaccaaggaggaccgagctggaccgaggaggaccaaggaggaccgagccagacgaaggaggactgagccggacgaaggagaaccgagccggacagaggaggaccaagctggactggggaggactgagccggatggaggaggactaagctggaccggggaggaccgagctggacccgggaggaccgagccagatggaggaggaccaagccggatagaggaccgagccggatggaggaggactgggccggacggaggaggaccgagctggaccggggaggaccgagccagacagaggaggactgagccagacggaggaggactgagctggaccggggagtactcagccagacggaggaggaccgagctgtacggaggaggaccgagctggaccgaggaggaccgagctggaccggggaggaccgagctggaccagggaggaccaagctggacccgggaggaccaagctggacccgggagaggcagaggacagggaaggagtcagtgggttctgggccagttctgaaggtgaagctgccatcatttgctgccagatcagccgtggaagtggggcaggggcagggatgcagctgacctttccagggcatcacagagacagatcagccgtgggagtggggcaggggcagggatggagctgaccgttctggggcatcacagagacaggacagcctgggagaggctcagacacgcccaggccacagctcagaccaaactccaccacaggccatcggcccacacagtgggcacagccgcatcccaagccccggccttcccgagaccgcccccacgtgccccacggccacggcccatggagacgccattcaggccacgcctcgggagccaggagcccaggcaattagaggaaccaaattctaaacaccaacgagacattgctttgcctcccatcggatcagccgaaatcgccaaggacgatgacactgggagctggcagtgccgtgggaaacgggcagcctccctcggcccctgtcggacaaggctcccgctgtagctgagctttctggaaggtgtcgccatcgcttctaacagtgagcggtgactccagaaaccacgggcatgggcctcagcaggggcctggaggcaccgatggtggagaggccggaaaggggtggccaaccggcacgacaatcaccaagcacgagcgccaactcatcccaggctcagcccctagcacacacggtcatcaccccacttcacagacgggacgctgaagcccggggaagtgacggccacacagcacctgaagcgcggagctgggagggggacatcggcgggaccaactctggggctcccccttaaccactgcctggcgctcgccctctctacaaaccgataccaacatagggtggggagactccagatgaccagagataaaaagcaagcagttcacagagtcataaacgtgtggcatttctcaccagggccgtcctgcccccaggggacactgaacggtgtctgggtcacttgtggctgtcacaactggcaggtgctcctggcatggagtgggcagaagccaggggcgttgctcagcacccctaatttcctgactcaaaatacctctgccaaggcacagaagccccagtgaggcatgaaaccatctcggtgaagaacaagcaggcccctttatgtgctcacgtctctgtggcccagccaggcacaacctaaactcaccagcgctaacatcaggagggatggcgttggaggagtgaggcaactctgaattttaaacattcagaagcagtatatggccagctggggtcagatttctgtggatttcagggatgggcagagatgccagaccctgaccttccagccctccccggccccccacccccacccccccactcccccgctctcccaccccaccaccatgctcagtctggagctggcaactttatctgtccccggtgctcccagagcccctgataagatgaatggtcgcggtgtggttttcttttggtcagcgagtcctgggctactttgtctctgaccagctggggtcagagggctgacagcggaagttggggggcccaagaaaggaacccgggctggggcctggtgccctgcctgggttcctccaccatgtctcttgctggccaggccaggacaccggctgcccgcaaagaaaggggcgaggccactggctctggggaaggaaccgggtcacctaccaagcggttccagatggccgccgggagggaagccacgagtgtctttcaaggcggggggtgggggggggacttgatgacttccacactctctctctctccagacatctccccaactcccaggcagcacgcatcgcccgcccgcccgcttgcccgcctgccaaccaaggaagcttcgggaggcctggggggagaaggaggacggatgcccgtgtgggtgtctacagagacgctgctgctggctgcctgggaggagcagaggattttgtgaatccggaaacttccgatttgggagcttgtgacctcgactgagaaggaactgttcccttcctctgggctctgcacaccgtccccacagaagggaaggcccagctgccgccacctacccggctggaggtccaggaagcagctaaagggggcatgagacagccgtgccccccgcccagcccgcagccccaccagtgtgtcctgggggaaggctcggggagaggaaaagggggcgacagggcaccctgtgtgcacagccggggcggtggaggcatcttgagatgtaacccttttcctcccctcattttagcagggaggtaaactgaggcccaggaaggtgaggaaaggtcgcgcacccggactcaggtctggggacttacagaaagggaggtgacatcaggaggtgggcacgcacggcctcagagacccccgcctccacccaagcagccgccactcacacgacgggcagcccctgggagcgggtcaggcagaacggggatccccagcggcgcccacgccgagtcgcccccggcccgggagcggtgggaggtagcccctcgcaggcctcccgcttcccggcgcggcttcagccccgtcctccccgcggctccaggggactgccccgccccaggctcctggaaccggcggcgcccccgcagcgaccgtgcagcccccgccccggccccgcagccccgcgactctcggcgctcggacgagcccagcgggccgcagccccgggaggccgggccgttacctgccgccgccccgctctctgccgcccacgccgcctccgagggcacggcccccgcctcagcgctctccgcctcgtccggtacctccagctccatggccgcgcgcggacggcggcgggggcgcccgagggggacccgagctgcgaccgccgccgccgaacaacaagcgccgccggccaagggagggcgcgccgggccggcgcggggcggacggggcggggcctgcgtgcgtgcgacgccgcggacggcgcgcggccaatcggggctcgggggcggggcctgcttgcgacccgcagccaggagcgcctcgagtgccccctcgcgcccaggggtgggagtacagagccaggctcgccattccatcgtattaggtcagtaagattgacaggcacgatacgtatcaataacattgctgtgcacaacacataccaataacatggatctacacaacacatgacaataatatggatctatacagcacgtgccaataatatggatgtacacagcacatgccaataacatggatctaaacagcacatgccaataacagggacctgcacagcgcatgacaataacatggatctggccgggcgcggtgactcacgcctatattcccggcactttgggaggccgaagagggcggatcacctgaggtcaggagttcaagaccatcctgaccaacatggtgaaatcctgtctctactaaaaatacaaaaaatagctgggcgtggtggcacatgcctgtaatcgcggctactcgggaggctgaggcaggagaatcgctggaacccaggagggagaggttgcagtgagctgagatcgcaccattgccctccagcctgggccacagagtgagactctgtcccaaaaaaaaccacacatggacctacacagcacatgccaataacatggagttacccaatgcatgccaataacatggatatacacaatacatgccaataacacggatatgcacaatacatgccaataacatggatatacacaatacatgccaataacatgaatctatactatatcattgacatggatctacataaaacatacaaatagcattgctatatgcaatacatgccaatcacattgctatacacaatgaataccaataacattgatctacacaatacatgtaactaacattgatacacacactacatgtcaataacattgatatacacactacatgccaataacatggatatacacactacatgccaataacattgatatacacactacatgccaataacattaatgtacacactacatgtcaataacattgatatacacactacatgtcaataacattgatatgcacaaaatataccaataacagtgatatacacagtacatgtaaataatattgatctacacagggccgggcgcggtggctcatgcctgtaatcccaagactttgggaggccgaggcgggcggatcacgaggtcaggagattgagaccatcctggttaacatggtgaaaccccgtctctactaaaaatacaaaaaattagccaggcgtggtggcgggcgcctgtagtcccagctacttgggaggctaaggcaggagaatagggtgaacctgggaggcagagcttgcagtgagctgagatcgtgtcactgcactccagcctgggcaacagagcgagactccatatcaaaaaaaaatatatatatatatagatctacacaatacatgttattaacattgatctacgcaatacatatcaataacatttgcaattaactacctgtttattatcatattgcaaataatatttatattccatcgtttgtattacgtaagtatagatatgttattgttttctttatattattttatcaataataatacagtttgctattataagaaacatataattatagaaatacataataaattatatatatttatgcaaatgtaagtagcaatatttatatccttcttttttttttttgagatggagtcttgctgttgttgcccaggctggagtgcaggggggcgatctgagctcactgcaacctctgcctccagggttcaagtgattctcctgcctcaccctcccaagtaactaggactacaggtacgtgccaccacgcccggctaatttttgtatttttagtagagatgaggtttcgccatgttggccaggctggtcttgaacgcctgacctcgtgatcttcccgcctcagcttcccaaagtgctgggattacaggtgtgagccactgcgcccggccatatttatgttctttatataagcacataataaggcttatgttgtttatgttaatttaagtaataacgtttatattatttacataaatgtaaatcataatgattatattacctatgcacataaataatgtttggggtgggcacagaggctcccgcctgtaattccagcactttgggaggccaaggcaggaggattacttgagctcaggagttctagaccagcctgggtaacatagtgagccctctcatctctacaaaaaaaatttttttaattagctaggtgtagtgagacccctcatctttacaaaaaaaattgttttttaattagccagctacttagtaggctaaggtgggaggactgcttgagcccgggaactcaaggctgcagtgagctatgatcgcaccactgcactctggcctgggcaacagagaaagaccccgtctgtccccgcaaaaaaaaaaaacaaacaaaaaaaacaaaaagacaaattctgtgtggttccactcctaggaggtccctagagttgtcacattcacagagacagaaagtaggatggggggtgccaggggcttggggggagacgaggagtgagtgtttcacaggggcagacttccagtctcagaagatgagaacattctggagatgatggcggtgatgtttgcacagccatgggaatgtgcttaaggccacggagctgtgctcttagacatggtgaaaatgggccgggcgcgggggctcacacctgcaatcccagcactttgggaggccgaggtgggcggattacctgaggtcgggagttcaagaccagcctgactaacatggagaaaccccgtctctactaaaaatacaaaattagccaggcgtggtggcgcgtgcctgtaatcccagctactcgggaggctgaggcaggagaatcacttgaacccgaaaggcagaggttgcagtgagccaacatggcaccactgcactccagcctgggcgacagagcaagactctgtctccaaaaaaaaaaaaaaaaaaaaaagaagaagaagaagaagaaagaaatggtgaaaatgggccgggtgcggtggctcacgcctgtcatcccagcactttgggaggccgaggctggcagatcacctaaggtcaggagttcaagaccagcctggtcaatgtggtgaaaccctgtctctactaaaaataccaaaaaattagctgggcatagtggcacaggcctataatcccagctactcgggaggctgaggcaggagaatcacttgaacctgagaggcagaggttgcagtgagccaacatggcaccactgcactccagcctgggcaacagagcaagactcgaaaaaaaagaaatggtgaaaattgtgaattgtatgttgtgcgtattttactaccattttttgttttttcttttttgagatgagtcttgctctgttacccaggctggagtgcagtggcgtgatctcggcttactgcagcctctgcctcccaggttcaagcgatcctcccacctcagcctcccaagtagctgagaccacaggtgtgtgctaccatacctggctaatttttgtaatttcagtagaaatgggatttcactgtgttggccaggctggtgtcaggtgatctgcccacctcggcctcccaaagtgtgaggattacaggcgtcagccactgcaggcggccttgaccattttaaggctccaggaagagttctttggacgcaggtcatggacagagctcctgattcacccagaatctgttttgaaaaaagatttagaccactggctctcaaggtgtggtccctgggccagccacatcagcctcaccctgggagcttgttagaaatgcaggttccaaagccaggtgcagtggttcatgcctgtaatcccagtgctttgggattgaggctgaggcaggagaatcactttagcccaggagttcaagaccagcctgggcaacatagcaagatcccatctctacaaaacaaattaaaaattagtctggcgtggccagatgcagtggctcacgcctgtaatcccagcactttgggaggttgaggcaggtggatcgcctgaggtcaggagttcgagaccagcctgaccatcacggagaaaccctgtctctactaaaaatacaaaaattagtcgggcatggtggcgcatgcctgtaatcccagctacttaggaggctgaggcaggagaattgcttgaacccgggaggcagaggttgcagtgagtcaagatctcgccattgcgctccagcctgggcagcaagagcgaaactcctctcaaaaaaacaaaaatagcctggcatggtggtgcacacctgtagtcccagctacttgggaggctgaggtgggaggatcgcttgagcccagaagtttgaagctgcagtgagctatgatcacaccactacagtccagcctgggcaacagagcgagacctggtctcaaaacaaacaatgaaaagtaaaagaaatgcaggttcctaggcccccacccagacttcacacaccagaaactgggcagagtagggtggtgggagggcacaatctgggtgttcatgactcctcccttccaggcaaactgggtgccagataaagtttgggggaaggggccagccacggtggctcatacctgtaatcccagcactttgagaggccaaggtgggcggatcacttgaggtcaggagttcgagaccagcctggccaacatggagaaaccccatctctactaaaagtataaaaattagccaggcgtggtggcatgcgcctgtagtcccagctacttgggaggctgaggcaggagaatcacctgaactcaggaggcagaggttgcagtgagccgagattgcaccactgcactccagcctgggcgacagagcgagactctgtctcaaaccaaagaaaaggaaaagaaatgcagtttcccaggctccaacgcagacttcacacaccagaaactgggcggggtggtgggggtggtaaaatctgggtgttcatgacttcccccttccaggcaatttggatgccagataaagtggaggaagtgctggaggttagatcattgatgaggataatgaagaggaaatatacttaaaaaaaattactaaaactggctgaacagtcatgacttacagacgcaaaagtcaacatcaaaacaagcagttaaaagcagcctcttggccgggcgcggtgggtcacgcctgtaatcccagcactttgggaggcagaggtgggtggatcacctgaggtcaggagtttgagaccagcctggccaacatgatgaaaccccacctctactgaaaataccaaaaaagtagccaggcgtagtggcacatgcctgtaattccagctactcgggaggctgaggcaggagaatcgcttgaacccgggaggcagaggttgcagtgagccgagatggcgccactgcactccagcccgggagacagagtgagactccgtctcaaaacacaaaaacaaacaaacaaacaaaaaacttaaaaaaaagaaaactagggcagggatggggtgacaggaggggagaggcaagggacagagaggaggggctggggtccgggagagccaccagccttctgtgccttccccgcatccccccacgcccctggttggctgtccccattacgcagggtggaaaaccgaggctgcccggcgggggccggttgcgtggtttctggcgccgcctggtggccatagtggctactaccgtcagcaggaggtactgcaggctggagggaccctagtccattcattccaaaaacatgtattgagcacctactgtgtaccaggcactgtgctaggccataggacacggcagggatgagcacgacaaagtccatgacctctgtgaggtggcattttaatatttatttatttatttttcagccagcgtcttgctctgtctcccaagctggagtgcagtggcgcgatctcggctcactgcaacctctgcctctggggctcaagcgattctcccgtctcagcctcctgagtagctgggattacagacgcatgccaccttgcccggctaatttttgtatttttagtagagatggggtttcaccatgttggccaggctggtctcgaactcctaactcaagcaattctcccacctcaacctcccaaagtgctgggattacaggggtgagccattgagcccagacttaattttttaaattttaattttaatgtactggtaaagatgggggggtgtctcactatgttgcccagactggtctcgaattcctggcctcaagtgatcctgccaccttggcctccaaagtactgagattataggtgtgagccatcatgcccaacccttcctggttaattttattttattgagataggatcttgctctgtcacccaggttggagtgcagtggcacagtcatagctctctgcagcctcaacctcccagggtcaattgatcctcccacctcagcctcctgagtttctgggactacaggtgtgtaccaccacatctggctaatttttaaaaaagttttctgggctgggcgtggtggctcacgcctgtaatctcagcactttgagaggccaaggcaggcggatcacctgaggccaggagttcaagaccagcttggccaatatggtgaaactccgtctctacaaaaatacaaaaattagctgggcatgatggctggtgcctgtaatgcaatcccagctactcgggaggctgaggcaggagaatcacttgaaaccgggaggcaaaggttgcagtgggccgagatcaagccattgcactccagcctgggcaacatagcaagactctgtctcaaaaaaataaaaaaaaaataaaataaaaacaaaaaacaaaacaaaaccaacaacagccagcagcaacaacaaaaaaacttttctaggccaggctcggtggctcacgcctgtaatcccaacactttgggaggccgaggcgggcagatcacttgaggtcaggagtttgagaccagcctggccaacataggaaaaccccgtctctactgaaaaaaaaaaaaaaaattagctgggcgtggtggtgcacgcctgtaatcccagctacttgggaggctgaggcagaagaatcacttgaacccaggaggcggaggttgcagtgagccgagatcgcgccactgcactccagcctgggtgacagagggagactccatctcaaaacaaacaacaaacaaaagatatataaaaatttttctagagatgggtttcaccgtgttacccaggctggtctcaaattcccaggctcaagtgatcctcccacctcggcctcccaaagtgctggaattacaggtgtgagccaccacacctgaccctttcttgttttttagatgaggacagcaagaagcccctgtaatttgcccaaagccacacagcggggaagtggcagaagcttctgtacgtaggaacccagtcacttcgtagcagagaggcagactgcgcacagatctgcgtggggaagggagtgcgccaagccacagcctgatgggccggcgtgcctggcaggaggctcagcaagcacagagactgggcagctccagatgcaagaagcaggagggagggggactccgggagtgcggtccattcatgtctgaatgtagccaacgagggtttcctaagcacctaccatgtgcggacgcttgataccagggcctcggcggtgagggcacaggcaggagcaagctcacctctgggcaagcaggggttaaggccagttgctcccacgtgagggcaccttgcgacagagccacacacccagtcctcctgctggcccgcccctcaccctggtccgtctccctgtgtctgtggtcgtcagttccactggcaggggacctgcctccctgttgccaccacaagagaggaaaagttggtcaaacaggtggggaggccagagctacaagcctcgggttccctccccaccacccgtgccaggcaggcacccgggccctggcacctgctgcctgcccagaggccacccagcctcctagacaggtaagtcccccgccccactgtgcttttccacccagtgtgcattgtctgagctggccttccccagctgagggtccttagactcccccccaacctcccccaccacgagctgtctccccggctcctcggaaagcaggaaactgacactcctgcgtgggcatctgacatagtttcgtagggattatctgaccggcagttactgcacctggcggcctgcccaggacgctgagctggaaacttaaaagggtcattgttacctaggtggcgcagggaccggggaggcggcaaaggggcacaggttggtctctgatccccctaactgaggaggggaggggatatcagtccagacggagcctgggtttacctcctgcagcccgaggctaggaggtgacaggtgggaaaggctgcgacctcactcatctctgagcctcctggaacttcttaaaaggctcccaagttttgaaacaactgcgtctcccgccccccaacccctcaccctgttctcaccgctggaacctccaggagctttgcagggagggattggggtggcctttcttttgctaattttttttttgagacggagttttgctcttgttgcccaggctggagtgcagtggtgcgatcttggctcactgcaacctctgcctccacctctgcctcccgagtagctgggattacaagcgcccaccactatgcccagctaatttttgtatttttagtagagatggggtttcaccatgttggccaggctggtctcgaactcctgacctcaggtgatccaaccccctcggcctcccaaagtgctgggattacaggcgcaagccactgcgcccagacttctttttctaatctttactcctccgagcaaaatctctgtgggatggggcagaggggaaggaggaaggagcgctcagagccagagaggggaggggtcggcagcaaaagtgtttttctgggtcatttgctcccaaatgggaagaccaagggagcttcctcgtgagccaagtgtccgattgcatctcaagtctctctccagaaccaagagggtcccccggggccgaggaggcatggatgatcgcatagtgggggacagagcggcccggcatttggggtcaccttgtggctgtgtggctgcagagctcccagggagcaggcttgcttgagattcgggagtccgtgggggtgggcgacatggatcccaccttgcctgggttttgagagcaaacccgtggactcagttagatctggcttccacacctcccttctctccgggcctctgtttcctgctctgtaaaatggggatattgagggccgggcgcggtggctcacgcctgtaatcccagcactttgggaggtcgaggcgagtggatcacaaggtcaggagttcgagaccagcctggccaacatggtggaaccctgtctctactaaaaatacaaaaaatgagccgaatatggtggcaagcacttgtaatcccagctactccggaggctgaggcaggagaattgcttgaacccaggaggtggaggttgcagtgagccgagattgtgccactgcactccagcctggacaacagagtgagactctgtctcaaaaaaaaaaaaaaaaaaaggggtggggggatatggagtcaccaaggcacagggctgttgagtgccggatgtaataaagcgggtaacagattctcggtcattctggggtcaagacgagctatcccggtccgaatcggagtctggtctcatcagcttcctggtttgtagaggatgaaccctggctcagagaaggacagccgcttaccccgggccgcacagccaagtagaaatgtcaggcggccaagagtcaagacgcagaggacagggagctggtggcgggggtggtgctctggaggctggccctgcccccagctgatgcctcaggctcagcatctcgagaaagtcctgccccctggcttggtgcttcctcgtggccctgagtcccggggaaagtccagggcagggagtatgggtacttgttcttcctctttagggctggccaggggccaggggagctgtgtttgctcagggtggaacctgacaccctttggaatggattgaggttagcggaagcctaggctggggggaggggtcgcccagggagcgaacgggcatttattgtgcacttactgtatgcgcgagtgtggggtcaccaggccttggagattcagcagtgagcaaggcaggccaagcttcctgctctcgtggggcgcatattttggtggggaaagacagacatgaaacaagagcgcagtaatggagccaatggctgcacagagggtaacatgcgtgagaggcgctttgtaactttattttactttttatatttttttgaaacggagtctcgctctgtcgcccaggctggagtgcggtggcgcgatctcggctcactgcaagctccgcctcccgggttcacgccatactcctgcctcagcctcccgagtagctgggactacaggcgcccgccaccacacccggctaattttttgtatttttagtacagacggggtttcaccgtggtagccaagatggtctctcctgaccttgtgatccgcccacctcagcctcccaaagtgctgggattacaggcgtgagccaccatgcccggccttattttatttttttttgagatggagtctcgctctgttgcccaggctggagtgcagtggaacgatctccgctcgctgcaacctccacctcctgggttcaaagcgattctcctgtctcagcctcccaagtagctgggattacaggcgcccaccaccacgcccagctaatttttgtatttttagtagagacagggtttcaccgtattggtcaggctggtctcgaactcctgatctcaggtgattcgctcgcctcggcctcccaaagtgctgggattacaggcgtgagccaccgcgtccggccaaaatgaagggagagctttaaatgctggcctgaagacatttggctttatgatattaaaggatattttttcccaaaatagtaaaatcattactctcatacaaatacaaaatgaggccggatgcggtggctcacgcctgtaatcccagcactttgggaggccgagacgggtggatcacgaggtcaggagttcaagaccagcctggctaacatggtgaaaccctgtctctactaaaagtacaaaaaaaaaaaaaaaggtgctttatgtgtctgcttaattcattaattaatatgggaaccggtaagactttatagcctatacagaggggaattaatttgtttcctttctttcttttttttaaaaattgaaaatagaaatggggttttgctgtgttggccggcctggtctcgagcttctgggctcaagtgatctgccagcctcagccactcaaagtgctgggatttcaagcgagagccaccgacccggcctcagcattcttgattgcctgtgtgtgtgtgttctttcagttctcctctggaccagacacggtggctcacgcctgtaatcccagcattttgggaggccaaggcaggtgggtcacttgagcccaggagtttgagaccagcctggcaaacgtggtgaaactctgtctctactaaaaatacaaaaattagccaggtgtgttggcgtgtgcctataattccagctacttgggaggctgaggcaggagaattgcttgaacctgggaggcagaggttgcagtgagccgggatcgcaccactgcactccagccccagagacagagcaagactccatctcaaaaatgtcattccgtgcccagaatgacagcaccttagcgtagatggtttccatggggcagggggccccctctagccctgggacactgtaattcacctttggctttcccactgggggcccgagtggagttagaagcatggagaggcagcccaggggatccttagtggcagatgcttaaacctttgagccttccctgaaatactgctcagggtcaaaaccgggatccccgttttacagatgaggaagctgaggcaggggctggaattcacatgggctctgcttttctctctctgctgtggaacttccttctagagctcagccgtcctcccttttgggggaaatggcatctttggcatggcttggtggctcccgcctggaatcccaacattttgggaggccgaggtgggaggatcgcatgagcccagcagttcaagacaggtccgggcaacatagcgagataccgtctctacaaaatatacaaaaatctgctgggcagggtggcgtgcacctgtggccccagctacacaggaggctggggtgggaggatcgcttgagcccaggaaagtggaggctgcagtgagctatgattgcaccactgcactccagcctaggtgacagagcaagactctgtctcaaaaaaaaaaaaaagaaaagaaaagaaagtcccctgttgaacaccctgagctgcattccatactccaagcttctagcaggttccacactcctcctacttcaaagtgccccccatgagtcctacttcaaagtgccccccatgaggtcctccagcctccccaggacgccaaaccctgagacgttcttcagccctccagtgccttagggctgagccggccacacctagaatctgcccttcctcaaaggtcgtttggatcttggcaacccacagaccggggcgtctcctcccacctggctgccctccatctctgctctctgtctctgctcctgccccgtcctctccacacggcttccttaaaacctcccagggtcccccaaaacccatgacgccagtctagtcatgagggaaacagctggtccccaatgtccccacattgagagttattctgcaaaagacctgcccagcacagactaacaggtcacagaacaggaaagacagaatcggtcacagcccagcggtgtctaaggagacgtgacagccaactaccaggtgggatcctggatggggccctggggcggcaaagggcctgcggagagacgtgaataaagtgtggagttcagtgaacaaggttgtactgatgttgacttcttggttttgacatatgtacccgtgtaataatgttaatgttagtggaaatcagttgggtgtataaaggaattctctgtgtatttacttttctgtaactttaaaattattattattatttatttatttctttttttgagacagagtctcgctctgtcgcccaggctctggagtgcagtggcacgatctcggctcactgcaacctccgcctcccaggttgaagtgattctcctgcctcagcctcccgagtagctgggactacaggcgcccgccaacatgcccagctaattttttttttttttttgtatttttagtagagacggagtttcaccgtgttggccaggatggtctccatctcttgacctcgtgatccacctgtctcggcctcccaaagtgctgggattacaggggtgaaccaccacgcccggcctattattattactattatttaatttctttgttgttgttttgagacagagtctctctctgtcacccaggctggctggagtgcagtggcgcaatcttggctcactgcaacctctgcctcccggttcaagagattctcctgcctcagcctcctgagtagcagggattacagcagcccgccgccacacccggctaatttttgtatttttagtagagacagggtttcatcatcttggcctggttggtctcaaactcctgacctcatgatcctgcctcagccccctgagtagctgggattacaggcacgtgccactacgcttggctaattttagtatttttagtagagacagggtttcaccatcttggccaggctggtctcaaactcccgacctcgtgatccacccgcgttggcctcccaaagtgctgggattacagatgtgagccaccgcgcccagcccgttcttttagtatttattgagcacgtactgcatacacagtgatggggctgcagaagaactgattgacagacacagtggaagcccacagtctttaggggagacagacaataattgaataatcgcatatgtaactaaaaagtacaattaggccaggcgcagtggcacacacctgtaatcccagcactttgggaggccaaggcgggcggatcacgaggtcagagttcgagaccatcctggccctgatccactgggggacctcagcccagcccctgctatctctgggcctcagttttcccacaagcactcagaaggggttgagctggctcatcccagggaggcctccagaactccaccttccctgggtcctcctgtccctcaccctgctcagatcacactggccctgaacgctggttcccaatcacacgtcatatacttggcttgcaacagttttgttgactgagtgactgaatgcacagaagaattaaggcacaaatgaagtagattgctgaaaagcagattttctctttttttccttttctttttgctattattatttttacttcgtgaggcaacagtagaaaaccaggttttttgtttgtttgtttggttggttggttttttttttttttgagatggagtctcgctctgtcgcccaggctggagcgcagtggcgcaatctcggctcactgcaacctccgcctcccgggttcacgccattctcctgcctcagcctcccgagtagctgggactacaggcgcccgccaccacacccagctatatttttgtatttttagtagagatggggtttcaccgtgttatccaggatggtctcgatctcctgacctcgtgatccgcccgcctcggcctcccaaagtgctgggattacaggtgtgagccaccgcgcccggccaaaagcaggtttttaattcattaaggtgatccgaaggtcaggggtggtgggaataaggggcttaaggctatgcccatctccaaagccttggatttgaacccaggtttggaggatggtactagggagccatcgagtgttcttgagcagggcatggatatgagagcagacggtgggtggttggaggaagacaatgtgtcctggtgcagttatccagcttcctctcttagaggggttgacagtgggatttctctgcgttgcccattgacatttggggccagatccttctctgggatggggccattctgggcaatgcagggtgcttagcagtatccctggcctccactcactcatgccaggagaaccttccaggtttatttttttattgtttcattttattttatttttttgagttggagtctcgctcttgtcatccaggctggagtgcaatggcgcaatctcggctcactacagcctctgcctcctgggttcaagcaactctcctgcctcggcctcccgagtagctgggattacaggcacccaccaccacactcggctaatttttgtatttttagtagagatggggtttccccatgttggccaggctggtctcgaactcctgacctcacgtgatccacccacctcagcctcccgaagtgctgggattacaggcgtgagccaccacgcccgacttgttttatttttgagatggagtcttgctccattgcccaggctggagtgcagtggcgccatctcagatcactgcgacctctgcctcccgggttcaagtgattctcctgcctcagcctcccgagtagcagggattacaggtgcctgtcactacgcccagctaatttctgtattttgagtagagacggggtttcaccctgttggccaggctgctctcgaactattgacctcaagtgatccgcccatctcagcctctcaaagtgctggaattacaggtgtgagtcaccgcgctcggcctggtattgaacaccaaaatgtctcaagacgttgccaagggtccccctctggtgagaggcactggcttggagttcgaggtgcaggggcaaacagagctgcagccaaatccctcaggccagctcaccatctggcctcagttttctcagctgcaaagtgggcgcacgagtgttgtgtgtaactggggctgcagccaagcatatgccagtaaacatggcccgggagccccattcactgctaggactttaacccacttatttctttatttatttttgagacagcgtctagctctgtcacccaggctggagtgcaagggcaagatcatggatcactgcagcctcgacctcctgggctcaaatgatcctcccacttcagcgcctagaggtgcctgctaccacacccagctcatacatatatatatatatatatatattttttttttttttttgaaacagagtctcagtctgtcgcccaggttggagacagtggcacgatctcggctcactgcaccctctgcctcccaggttcaagtgattctcctgcctcagcctcccgagtacctgggattacaggcgggtgccaacacgcccaggtgacttttttttttttttttgagacggagtttcgctcttgttgcccaggctggagtgcaatggcccgatttcggctcactgcaacctccgcctcccgggctcaagcaattctcttgcctcagcctctctagtagctgggattacaggcatgtgccaccacacccagctaattttgtatttttagtagagacgaggtttctccatgttggtcaggctggtctcgaactcccaacctcaggtgatccgcccgcctcgacctcccaaagtgctgggattacaggcacgagccaccacgcctggcccatgactgttatatttttagtacagacagagtttcaccatgttggccaggctggtctcaaactcctgacctcaagtgattcggccgccttggccatccaaagtgggattacaggcgtgagccactgtgcccagccatagcttatatatatatatatatatatataattttatttttttttgaaacatagtgttgtgctgtctgccctgtcacccaggctggagtgcagtggcgtgatctcagctcactgcaaccgccgcctcccagggtcaagtgattctcttgcctcagcctcctgagtagctgggattacaggcgcctgccaccatccttggctaatttttcgtatttttgtagagatgggttttgccctgtgggccaggctggcctccaactcctgactcaagtgatcctcctgccttggcctcccagagtgctgggatgacaggcatgagccactgcaccctgcctaagatatttttaaaaatttttgtggatgtggagatgggggtctcactgtgttgcccaggaatgagagtacagtggtgtgaccatgacttactgcagcctccaccgcctgggctcaagcaatcctcccagctcagcttcccaagtagctgggagtacaggcaagtgccaccaagactggctaattaaaaaaaaaaaaaaaggccgggcacgatggctcacgcctataatcccagcacttagggaggccgaggggggcggatcacaaggtcaggagtttgagaccatcctggctaacacggtgaaaccccatctctactaaaagtacaaaaatcagccgggcatgtgcctgtagtcccagctactcgggaggctgaggcaggagaatggcgtgaacccgggaagcagagcttgcagtgagctgagattgcgcctgggcaacagggcgagactccaactcaaaaaaaaaaaaaaaaaaaaagtgtgtgtgtgtgtgtgtgtgtgtgtgtgtgtgtgtgtgtgtgtctgtgtgtgtgtagagatggaagtctcactctgttactcaggctggtctctcctggcctcaagagatcctcccgcctcggccttccaaagtgctgggactacaagcgtgagccactgttcctggccaagcctcttattttaaagacgctgaagtcagaaagcctgtaggacaggaatgcagcattttcttttcttgcggttttttttttttggggtggtggggggcggggtggacagggcctcactctgtggcccaggctggagtgcagtggcgcaatcttggctgactgcaacctctgcctcccaggtttaagtaattctcctgcctcagcctccctagtagctgggactacagacgtgcgccaccacgcccagctaatttttgtattttcagtagagacagggtttcacaatgttggccaggctggtctcgaactcctgacctcaggtgatctgcccgaatgcaggattttctaccagctccagtcccctgcagaacccctgtccgattttgccagacctaagcagagactgctttgagcaatggcagccacgaaccttgacgtgtgcgggccggtagggaatgatgtgtttttctcacgactcattaaaacaaatacacggctatttaaagatcgctggactggccgggcgtggtggctcacgcctgtaatcccaacactttcagaggccgaggtgggtggatcacctgaggtcaggagttcgagaccagcctggccaacatggtgaaaccccgtctctactaaaaatacaaaaattagccacgcgtggtggccggcgcctgtagtcccagctactcaggaggctgaggcatgagaatggtgtgaaccccgcaggcggagcttgcagtgagccgagactgcgcccggcactccaacctgggtgacagaatgagtgtccgtcttggggggtggtggacatcgctggaccttaatcatctaaaatgattttttgcgccacctgctggtggcggagtgtcacacagggaagggctgagttgcctgtaggtatacagtaggtgttcagtaagccttagttttggttaatggtgtttctacattggctcagcatggggtcttggaaagagtttggggctccaggaacccatgctgtgcaaccttcagtgagtctggggccctttctgaaccttcatctataaaatatgtgtgtgtgtgtggctgggagtagtggctcatgcccataatcctaacattttgggtggccgaggtgggctaatcacttgaggccaggagttcgagaccagcctggccaacatggggaaaccccatctctactaaaaatacaaaaattagccaggcgtggtggcgggtgcctgtagtcccagctactcgggaggctgaggcaggagaatgacgggaacccgggaggcggagcttgcagtgagccgagatcgtgcctgcagtccagctgggcgacagagcgagactccgtctcaaaaaaaaaaaaaaaaaaaaaagaagggaagacatataaccttcatgcgatgtgagaaggtgcgttgaaatgccttctacaattcttgcttcggtcggaagtcacaaagggattgaacttcattttggctgctcccacttctgtgatggccgcaaaagggaagagaactacatgctcctttttatttattttgtatggagattgggtctcgctatattgcccagcctggtctcaaactcctggcctcaagtgatcctcccacctgactcttcaaagttctggaattacaggagtgagccattgtgcctggcctctacgccccttttaatcctcctgacaaccctgtgatgtaggggctattattttccccaattacagatgtggaaactgaggaacagagaggggcagtaagttgtctgaggtcacacagcaaataggtgagagctggttttagaactctcctagctctgaagttccaagtgggtccccacaagaggctttggcaatgctttattcgggcccttggagacccttgaggggctgactgtagctgacttgggtctctggactagtgttttgggtacaattgcagtggaggaggtgagatgtcatcttcggggaccctctaagactttgatattgttggccttgtttactaagcaaactcttaaccaaccttcaaatccccagctacgatgccccctcctccaggcagcctttcttttaccgctagagttttctctatgctcttcacccctagccacaacctgggactcctgtccctgcccagccctgactggataaggctgggaaggggtgtttatgtgtagctttgcccttttacccttttaaccttggggtggggcccaggcacagctgggcgcaggtttttttttttatagtaaggaatgtgggggtgcagccacgaccagccccgcccacccaggtgacttgaaggtttcctaccctggtccagtccctcctaggtctaaccttaggaatcccggaatcccaggcccctgagcgggaggctgggctgggctgggtgagaagaaggaaacgacctttactccctcccagagcctgaagaatttcctcctgccttgcactctgcccctttcttttccttcgttccttccttccttcccttctttccttccttccttttctttttttttttttttttttgagacagggtctcactctactctgtcgcccagactggagtgcagtggcgtgatatcagctcaccgcaacctccgcctcccgggttcaaccgattctccttcctcagcctcccgagtagctgaagcatgcgccaccacgcccggctaatttttgtacttttagtagagacagacgtttcaccatgttggtcaggctggtctcgaactgctgacctcgtgatccgctcgcctcggcctcccaaaatttggggattacaggcatgagccaccgcgcccggccctgccctgccccctttcttttctggatgctgggtgtgaagacagagcccgcaggccaagaccgcaggaaaaaggcacgcagccgctgttgtatcttcagagtccacgcctctggcctctggggcctccggttcccctctgtggaatggggcaaaccttccagagataaggtgacccagggaccagcgctatgctaaggaggtctctggccttcgacaagcttctaatccaagaggcctcccagatgcacctcaaaatgtgcccatttcgcggacggaaacaccttccaaatagtaggctccgttccaagcgcgggggttattcctgccgggtcttgctggcagccttgtcgggccgggctctggccgcggccgccggccccctctcggctgcgtggataacccggcctggagtttccgcctcaggacctggctcctgtgatgggaggtggggagagaaacctccgccgcgtccagggggcgtgtctgggcaggggcggggctgacccgagacctggaggaggaagaggggcaggtgcagccgggagctgcggagctggagggaggaggacgagagcccggccctcagcccgctgtgactctcctcagccccctcccccagcccggggtgggggccgattgactgtttccaggaccccctcgggtaggggggctggagagcccccaggtggaccatggcggtgagattccaggcgagtaaccctccaagggtggcagggggaggggctcgggctgaggtggggtggggggaaagcagggtttgggagtcggacccaggaccccagaacgcctacctacataacaggcagggaaactgagtcccagagggatgaagtggctagctggaggttgcacttcgagatgcgtccgcgcgtccgcgcccccctccctgcctccaaagaccatctcttctggagcctcctctgccccaggaccggcctcctttaataccgcagggctgggttcaaatcccgaattttctgtccactatgctgtgtgtaacgtggggccagtgagtgaaccctctccttccctcatccgaaaaatgggtgatcggcattttaaacagagagaaaaatgtgttttaagagcttggcgcatcgtaggtgggcagaaaagatgttcatccccctttgctgggggcgtgcagccggctgagcttgggcgcccgcggtggcacggtgggcagtgacttcatttgggggctggggtggctttggtgaacattcacctcctacaaggctgcacgagggagcaccagcatttattgggtgcctactgtgtacaaagctattaacaggcattaccaggcagaggcaggggtggggtgagcaagccggctggggtgcgccgtggcgggggcggggcggggggcgatccttgtctccggagggatttcaccctccaggcatggagcctgggctggtttcttcagacccaccagccagggtagactgggactgcagcggtatgcggccagacccaggccactccgccccaagcttcaggacccggcacttctggttcccgctgacttcttccttgcctccaggcacagctctcagaatcccctccccaatcggtgtatttgttcgctgaaaccgccctctctgccattgttcctggagatggggtggcggggggggggggcacaggggacggcggcccgggagccccgtacccgggggcggtgtgacttggtaccggccccgtcccctctgggcgggcctcttgttcggtgtttgtgtccagccctgggcggggggcggggacaaagacccaagccccaccctctcagagttcacctggacaggggcagggctgggaactcaggacacacctgttgagcacctggccacagtgtgttttactcaaccattcactcattcctcaaactcttccctaagggggcctggtcctatggggtcccaggggcccatccctgcccatcgggagcgctcagactgagggggaaggtgtaaggtggacaaatccactctgacatcccacaccccaatcatcacatttgggccagagggaaggatgtatgatatgcgtacggaggaagaggctggggctgtgaaggatgaataggagtttgccagggagtccagtaccagcactcaaggcctggaaaggaggctgatggccaatcacctgggccttaagtagccagagagacagacatgtctcctttcacagcctaagaggaaagaccagaaacatactaaccgatggttaaagagaataaagatgatttttagatgccttgaataaaaaataataaaacaggctgggcgtggtggctcactcctgtaatcccagcactttgggaggctgagggaggtggatcacctgaggtcagcagtttgagcccagcctggccaacatggtgaacccccacctctactaaaaatacaaaaattagccgggcgtggtggttggacgcctgtaattctagctacttgggaggctgaggcacgagaattgctggaacccaggaggcggaggttgcagtgagctgagattgtgtcactacactccagcctgggtgacagagtgacactctgtctcaaaagaaaaaaaaaaaatatatatatatatatatataaaataataaaataggcaggagtgataggggatcagagaagactggttagctaggtggtcagggaggacttcctgaggaggtggcatttgagcctagacctcagtggcaggggccagccaggcaggaatcccgtgaaacatgtcccagattcaggggacagatggggtaaaggtttggaggtgaactaagatgaggtgggctgtgaggttaggcttaatccctcaggcactgtggagctctggagggtttagacaaagcttctggtttccatggagacgaacccgcacaagctgggacaagcctggaccacctggactccctcgcccctctcccactctgggttcgggggccctggttccctggggctgtctcttttttttttttgagacggagtttccctctgtcgcccaggctggagtgcagtggcacaatcttggctcactgcaagctccgcctcccaggttcacgccattctcctgcctcagcctcctgagtagctgggactacaggcgccggccaccacgccctgctaattttttgtatttttagtagagacggggtttcaccatgttagccaggatagtctcgatctcctgaccttgtggtctgcctgcctcagcctcccaaagtgctgggattacaggcatgagccactgtgcccgggcagggctgtctcttaaagtcaggaaatacaaattccttggggccatttaaaaattttttttgagacagggtcttgctctgtcgcccaggctggagtgcagaggcacgatcacaattcactgcagcctcgacctcctgggctcaggtgatccttctgcctcagcctctcgaggagctgggaccacaggtgcatgccaccatgcccggctaatttttgtatttttttgtagagatgagggtctcactatgttgctcaggttggtcttgaactcctgggctcaagcaatcctcttgcctcggtctcccaaagtgctgagattataggcagaatccaccgtgcccggccctggggccatttaatgacacaaagtataacatcaaagcaggttaaaaaaaaaaaagatgcagttttgaaaaataagctcagaagaaaaagagtaaataatcagaaagccactgtagcctggtggttaagagcaagagtgaggctgggtgcggtggctcacgcctgtaattccaacactttaggaggctgaggtgggaggatcgcttgggcccaggaatttgagaccagcttggtcaacatagcaaaaccccatctctacaaaaaaacaaaaaaatatgctgtgtgtggtggtgcatgcctgtggtcccagctacctgggaggctgaagcaggaggatcccttgggcctgggagttcaaggctgcagtgagctgtgattgagccactgcactccagcctgggcaacagagtgaaaccccgtctcaaaaaccaaacaaccaatcaaccaaccaaccaaccaaaaaagagccagagaacagggcaggctgccaagttcaccactgtgctgcgtgacctcaggcaagttactgaacctctctaggccccttttaatctcacctctaaagtaggaataataactgtgccacttcctaaggtcactctgaggatgaaatgaatgggtccacatcaagcgcctgcttgcagccaggttcaagacagcctgaccaacatggtgaaaccccgtctctactaaaaatacaaaaagtagctggctgtggttgtgggtgcctataatcccagctactcgggaggctgagtcaggagaataacttgaacccaggaggtggaggttgcagtgagccgagactacgccattgcactccagcctgggcaacaagagcaaaaaaccccatctcaaaaaaaaaaaaaaaaactacacaaggagaaagtcattatttggccaccacctccccaaggctccttctgctttttgcttttcaggcattgaatctgtacccttttcccaaaccacatccctgcaagacagggcagcagtgccatttcacagatggggagactgaggctgggagaggccccgccatagctagcacgggtgggcagacttgggatttgagtccagtcctgagcgctgccctggctccttcagaactgcagagccctgccctctgctctgtttctctcccctccacccgccttcccactcctggagatcaggaatgctggcctcgctagagacgctggagcttataagaaaaggcactggagcgcaccaatggggggtgcctgggcagagggaatcacacacccgctgtgccaagcctagaaaacccgccccggggaggaggaggagtcacttctacaaactccctccccactccctccacctgtcccctgcctggggagcagggcatggtgcgtgctggcaggagggaagggagggtggaggcgtggccaggtgaccttgcacctgagtctggtgttctcattcatgccatggacatgaaaataacagaatctgcctggtgtggaggctcacgcctgtaatcccagcactttgggaggccaaggcgggcggatcacttgaagtcaggagttcaagatcagcctggccaacatggtgagacccccgtctctattaaaaatacaaaaattagctgggcatggtggtagacacctgtgatcccagctacttgggaggctgaggcaggagaatcgcttgaaactaggaggcagaggttgcagtgagccaagttggcaccattgcactccagcctcagcaacagagttttttttgttttttttttttctaagtgggaaagcccaggtgggaggatcatttgagcccaggagttcaagaagagtctgggcaacacagcaagaccctcctgtctctataaaaatagaagttaaaaaattagctgggcatgatggtatgcacctatagtcccagttactcaggaggctggggcaggaggattgcttgaagccaggagttcgaggctgcagtgagccataatggctcacacttgtaatcccagcactttgggaggccaaggctggagaatcacttgagcctaggagtttgagaccagccttggcaacacagagagactccatctctacaaacaataaaaaaaattagccgggcatcgtgatgtgtgcctgtggtcccagttacttgggaggcagaggtgggaggatcacttgagcctgggagttcgaggctgcattgaaccgtgatcacaccactgcactccagcctgagtgacagagaccctgtctaaaaaaaaaaaagtgtgggaggggggacttcatggctctgtgcctcagtttcctcatctgtaacatggggataattgaatgcacctttgatgaatgtattaaatgagatagtacatgtaaggctgggcgcggtggctcatgcctgtaatcccagcactttggaaggccaagggggtggatcacaagatcaggagttcgagaccagcctggccaacatagtgaaaccccgtctctactaaaaattcaaaaaaattagctgggcatggtggcacatgcctgtagtcccagatacttgggatgctgaggcaggagaatcacttgaacctggaaggcggaggttgcagtgagccaagatcacgccattgcactccagcctgggcaacaagagcgaaactctgtctcaaaaaaaaaaaaaaaaaaagagatagtacatgtaaagcacctggcacaaaggaagtgtttcattcattcactcattaattcattcagcaaatccttcttgaatccctgctgcaactcaggcgctgttctaggcagggaactgagggctcagttttggacaaagacaaaaatctctgccctctgtgggtggatcagttgaggtcaggagtttgagaccagcctggccaacatggtgaaatcccgtctctactaaaaatagaaaaattagcctggcgtggtggtgggcacctgtaggtgcccagctactcaggagcccagctactcaggaggccagtaggcagccagctactcaggaggctgaggcaggagaatcacttgaacttgggaggcagagactgcagtgagcagagattgtgccactgcactccagcctgggcaacagaatgagactccgcctcaaaaaaaacaaaacaaggctgggcacagtgactcacccctgtaatcccagcactttgggaggccgaggtgggtggatcacttgaggccagaagttaaaggccagtctggccaatgtggtgaaaccctatctctattaaaaatataaagattagccaggtgtggtggtgcacccctgtaatcccagctacctgggaggctgaggcaggagaatcgcttgaacccgggaggtggaggttgcagtgagctgagatcgtgccactgcactccagcctgggcgacagagccagactctgtctcaaaaaatgaaacaaaacaaaaaaacaaacaaaaaaacctgaggccctgagagaggtagtaacttgtcacaggctccaaacacaggcctgtcagagctggactccccaccctgagctggggacccccaagtgctcagatgaacctgtgtggcctcatgcccatcttccccgctcccctcgaccaggtggctgacatggaggagctgaccatctgggaacagcacacggccacactgtccaaggtgaggcctccctctccctgtctgggtgccagagagtatggcggcttaggcccagctcaatagaggggagaccctttaccctgggggaaacagcagctcttccttcccctcatcctctctcaggacccccgccggggctttggcattgcgatctctggaggccgagaccggcccggtggatccatggttgtatctgacgtggtacctggagggccggcggagggcaggctacagtgagtatccaggcagctgggttctggcgggggagggcacgtggagaggagaaaccaggccaggcacagtgactcacacccgtcatcccagcactttgcgaggctgaagtgggcggatcacctgagttcaggagtttgagaccagcctggccaacatggtgaaaccccgtctctactaaaattacaaaaattagcgggatgtggtagcgtgttcctgtaatcccagctactcgggaggctgaggcaggagacttgcttgaacccgggaggcagaggttgcggtgagccaagattgcgccactgcactccagcctgggtgacagagtgagactctgtctcaaaaagaaagtaagtgaggtgaggagaaacctttgtgagcctggcactttccagctctgtcaacacagggctcggacttggcagtaggacagtgtcagagacttgggcctcacttccctaaggtacttcctggtccttcacaggaattcttggggtcatagtggccccagagcccttttggaacataaagtcctggaaaccatcgagtgtttgagggtttgatgcttcttggaattatgttgttaaaatggttctgggccccaagtggctgacaggtgatatggctcagcccagcccagaattagggaccaccaggttcagagagaaagagctagaaagaaaatatgaaatacagacaggaagagagggaaagaaaagcagaaagtggggatttgtggtgtggggagcgaggagtgagaagatgccaggtgtagctgtagcttcaaggccgggtgcagtggctcacacctgcaatcccagcactttgggaggccgaggtgggcggattacctgaggtcaggagttcaaaaccagcctggccaacatggtgaaaccccatctctactaacaaatacaaaaattagacgggtgtggtggcgggcacctgtagtcccagctactagggaggctgaggcagaaggatcgtttgaaacgaggaggtggaggttgcagtgagttgagatcatgctactgcaatccagcctgggcaacagagtgagactctgtctcaaaaaaaaaaaaaaaaatgtagcttccactctatgattatagtaggttctacaattggctccattttacaggtgagaaaacggaggcccagaaggataaatgtctttgtgaacctagggacaccaatgaattagaaccaggccttgtagatctggaggttccaggggcaccccctccccagggagggcttgttacgagggtctcccctgcaaagcctcctccgtaagacccgccctcctctctcaggacaggcgaccacatcgtcatggtgaacggggtttccatggagaatgccacctccgcgtttgccattcagatactcaagacctgcaccaagatggccaacatcgtgagtaggcagcccctggcatggccagcatctctgaccccagcctgggtcgtgccgctgtgggggttgtaagcttctgagagcaaggagtcatcttctcatcttacagtttggacattgaggcccagagagagactggtgtcccccagggccacccgggggctgagcagagcctcccccagcccttgcctgtagctgacccttcctgtcccctcctctaacagacagtgaaacgtccccggaggatccacctgcccgccaccaaagccagcccctccagcccagggcgccaggactcggatgaagacgatgggccccagcgggtggaggaggtggaccagggccggggctatgacggcgactcatccagtggctccggccgctcctgggacgagcgctcccgccggccgaggcctggtcgccggggccgggccggcagccatgggcgtaggagcccaggtggtggctctgaggccaacgggctggccctggtgtccggctttaagcggctgccacggcaggacgtgcagatgaagcctgtgaagtcagtgctggtgaagaggagagacagcgaaggtcagaagaggcgggaggtcggacacgatcagtactggacacagggcaccgtggtcggatgggcgacggtttcaagtgattctcctgcctcagcctccctggtggctgggactccaggcgcccgccaccatgcctggctaatttttgtacttttggtagagatggggcttcaccatgttggcaaggatggtttcgaattcttgacctcaggtgattcacccacctcggcctcccatagtgcttgctgggattgtgggcgtgagccaccgcgcccagcctggaagctacaactacacctggcatcttcttgctcctcgctccccccaccacaaatccccactttctgcttttctgtccctttctgcctgtctgtatttcatatattctctctagctctttctctctgaacctggtggtccctaattctgggctaggttgagccatatcacctgtcagccacttggggcccagaaccattttatcaacatgtccccgcgctgatccccgggacctctgtttaggccacctcacttagcaagagggactcagcagatgggatggagtgaaggaccctgagctcagaggtgatcctggatgatctggggggcccagtgtcaccacagggtccttataagaggaggcctggctgagtgtggtggctgatgcctgtaatcccagcactttgggaggccaaggcaggcagatcacttgaggccagtagttctagaccagcctgaccactatgatgaaaccccatctctactagaaatacaaaaattagccaggcgtggtggtgtgcacctgtaatcccagctacctgggaggctgaggcacgagaattgcttaaacccgggaggtagaggttgcagtgacctgagattttgccactgcactccagccccggcgataggagtgagactccttctcgaaaaaaattaaaaaataaaaaataaaaattgaaacaatgatgatgttatgagcaatagaatgcccttagcctgtgcatggcaacatcacgagtggcacggtgacctggtgtccccgccccgtggagatgtcattgacacaatcagatctcgggtcctacgggcgacatcactgttctccttatgatgccatcaaggtgttaggatgggagggcccgcacctggactgcttacagcaggagaatgctcccaggcacccgtctccagagtcctgcctcagtttccctcctccccccttacagagtttggcgtcaagctgggcagtcagatcttcatcaagcacattacagattcgggcctggctgcccggcaccgtgggctgcaggaaggagatctcattctacaggtgaggccgggcttcttgtcctgagagcagggagacaaggcagggttggggcgggcagtcccacggagtcatacagcaaggacagcagaactgggccccaaagcatttaccttcagtgttgttgcttgtatctcaaaggttgcagatggccaggcataaaaccccctttttccccagctactactaatccacagccaaatgtcggtttctagtatccccatggggttgtctgtttctaataccctctagctttgatgtgcatcagagactcatgtgggcagctgactcctggacctaccctaggtgactggatgctaatgacccagtcaccaggtttaggggagctgccctgccctaaaggatggtatctttctggattcttcccctgaaagtctgtttctagtgactcctagtgtttgatttccaaattgctttcagctgattatttccagtgtcttcaaaaagttatctgtttctttttttttttttcagacagagtctcgctctgtcacccaggctggagtgcagtggcgcaatctcggctcactgcaacctccgcctcccaggttcaggtgattctcctgccttagcctcccgagtagctgggattacaggtgcccgccaccacacccagctaatgtttgtatttttagaaaagacgggtttctccatgttggccaggctggtctcgaactcctgacctcaggtgatcccccccgctcggcctcccaacgtgctgggattacaggcgtgcaccaccacaccttgctaattttttgtatttttagtagagacggggtttctccatcttggtcaggctggtctcgaactcccgacctcaggtgatccatccgcctcggcctcccaaagtgctgggattacaggcatgagccaccacacccggccgacattaagttctttctaggaattgtgtgtttctaatctacctctagatgactgttttcttttctcttttcttttctcttctcttttttcttttcttttctttctttttgatatggagtgtcgctctgtcacccaggctggagtgcagtggcgggatcttggctcactgcaacctccacctcccgggttcaagtgattctcctgtctcagtctcctgagtagctgggaccacaggcgcccaccaccacgccctgctaatttttgtatttttagtagagacagggtttcaccatgatggccaggctggtcttgaactcctgacctcaactgatctgtctgcctctgcctcccaaagtgctggcattacaggcgtgagccaccgcgccccactctagatatctgtttctagttatctcccagaagattgtgtgtttctagtatcttttaagtatctgatactccctcttctccagttagagttgtttataatgtcaccctcacatctgttcctagtatcccctgagacatttccacttttggtaagaaaggagagtcaacctgtttctcattttccccagtgtctcccacccctcttagaacattttctgtttctagaattcggtgctcagttcttggtgtggtctccactcacagcaggaatccaattcaacactttccttagggagtggctgtttttagcaacctctgggggaattgtctgtttcaagttcccccacaccaggctgtttctactgtctcccatctctcattaactcacttccgctctttcattcctggtccctttcagatcaacggggtgtctagccagaacctgtcactgaacgacacccggcgactgattgagaagtcagaagggaagctaagcctgctggtgctgagagatcgtgggcagttcctggtgaacattccgcctgctgtcagtgacagcgacagctcgccattggagggtgaggacctagaggttaggacctgggagggggttgaatggatggcagggaaggtgggaagccccaggcagggccaaggaatcaatgagcctggtccctagaggctcagagagtgacaggaacttgctgaaggccacacagcaagtcaagagttcaggggggcgatctcggctcactgggttcaagcgattctctgcctcctgggttcgagcgattctcgtgccttggcctcctgagtagctgggattataggcgtgagccaccgtgcccagctccagagccgaatcttctaactgagcttctgactttggtctagggccctttgtttagaggggtgttgatatacccctctgtaaaatgggtccagtccagaaggcgtgaccatggctgatgagatgtcctctccccctgcagacatctcggacctcgcctcggagctatcgcaggcaccaccatcccacatcccaccaccaccccggcatgctcagcggagccccgaggccagccagaccgactctcccgtgtaagtatcacccatcggccagaatggtgatagggagggagagggaggtgggagggagaggggaacgcgggcgtagctttccaactgggggtaaccttgaggacgcagtcctgtatttctagcatgtgcctcaaaatacctccagcctctacccattacccagttccaaagccgtgtccgcatttgtaggtgttggttacagcagcaccccacttcttagtatcaaactctgccttaggccaggtgcggtggctcacgcctgtaatctcagcactttgggaggccgaggagggtggatcatctgaggttaggagttcgagaacagcctggccaacgtggtgaaaccctgtctctactaagataccaaaattagcccggcgtggtgccgggtgcctgtaagctcagctacttgggaggctgaggcaggagaatcacttgaacccaggaaatggaggttgcagtgagccgagatcgtgtcattacactgcagcctaggcaaccagagcaaaactctgtcttaaaaaaaaaaatttctttttcctctatttatttatttgttttgagactgagtcatgtgagactggctaattttcatatttttggtagagatggggtctgtattgcccagctatgttgcccaggctggtcttgaactcctgggctcaagcatttggcctgcctcagcctcccaaagtgctggtattacaggcgtgagccaccacgcccagcccagataaattaaaattatttttattttgtttatttatttatttatttttttggagacaaggtctcactctgtcgcccaggctggagtgcagtggcatgatcttggctcactgcaacctctgcctcccgggttcaagcaattctcctgccttagcctcctgagtagctgggattacaggcgcccaccatcatgcccggctaatttttgtatttttggagagacggggtttaacctcgttggccaggctggtcttgaaatcctgacctcaggtgatctgcccacctcgacctcccaaaatgctaggattacaggcatgaaccaccgtgcccggcctaaaattctttttaaaatggccccttgaaatccatccctgcctcactcccaatctgttccccaccagggagagtccccggcttcggcgggaaagttcagtagattccagaaccatctcggaaccagatgagcaacggtcaggtgggtggtgactctgagcacccctgtccctgacatttctgatccctgacagcaaggctgtgccaggcagagctgggggaggttggcctgagcctaagtggtgagacatggtttcctgagaaggactcgaggtgggtgacagtccttccaggatgaggacataaagcaaaggtttggaggctggactgagccagtgtgcttgggaaagagactggcttttccctttcagagttgcccagggaaagcagctatgacatctacagagtgcccagcagtcagagcatggaggatcgtgggtatgtaccccagaagaaagcaaacccgctcaaaactcctacatcccaggctgcctccctcatcagcgcaatcctgcctgcttgtatccattgtgttgagtgggaccattaagtgggggttttggggaaactgaggcctggagggggtgggggctttcccaaggacaatgctgagccctccctttgtccgcccactctgctctgaccccatctctgcctccccttgcaggtacagccccgacacgcgtgtggtccgcttcctcaagggcaagagcatcgggctgcggctggcagggggcaatgacgtgggcatcttcgtgtccggggtgcaggcgggcagcccggccgacgggcagggcatccaggagggagatcagattctgcaggtgctccgggggcggctggccagccccactgatcatgggcgtgcagtgtgctaggtcctgcccttgtctgttccagtcctccccttgggtccacctggggactgtcgagaccccagatgggtatttgaacatttcagtgtctccttggctgtgtcatgattttgctgatgtcacgaccttatcttccaggtcatgacctcatcgtccagttacaacctccttttctgtgccttgaccttatctgggttcattttttgttgttgttgtttttgagatggagttttggtcttgttgcccaggctggagtgcaatggtgtgatcttggctcaccgcaacctctgcctcccaggttcaagcaattcttctgcctcacctcctgagtagctgggattacagttgtccaccaccacgcccggctaatttttatatttttagtagagatgagggtttcgccatgttggccaggctggtctcaaactcctgacctcaggtgatccacctgcctcggcttcccaagtagctgagattacaggcatgagccactgcgcctggctaactttttttttttttttttttgagatagagtcttgctctgtcacccaggctggagtgcgggggtgtgatcttggctcactgcaacctccgcctcccgggttcaagggatcatcctgactcagcctcccaagtagctgggatcacaggtggccgccaccatgcccagctaatttttgtgtttttagtagagacagggtttcaccatgttggccaggctggtcttgaactcctggcctcaagtgatgcacccgcctcagcctcccaaagtgctgagattataagcttgagacactgtgctcaagattgggaacaacaatcttgttgttcatgtcatatgacattgttcatgtgacattcttgttatcaatgtcacaatctccttgttatcaatgtcaggactttgggtcacagcctcattgcctatgtcatgaccttgtctgggtcgcaatcctcttgttcctgacattggctgtgttgaccgtgtcatgaccgtcttgtatgtcctaatcgtgtggtcaggtcacagatcattctctcatgatctccatgtccacttatagtcattttctgtgccaccatcccctgtgtctgtgttgtgaccttgcctgtgtcctgccttcatgacagtgtcataactacctccaggatccacagcccctcatcatccccccatctctgtccttgcctcatctcatccccaggctgtctcccctgtcccttgcgcgagttcactcaccaagtctcacccccactttgctctcatgaccttgcttgtgtcttgaccttgcagtgtgagttgtgattcatgatggagtcacagctccccactttccatgtcataagcccactggctgggtgaaaacttgatgccaaattgcctgagggtcatggtattttttactgtatttctactcattttgcttgtgggattctaaccttgacatccacgtcatgaccccgagagtaggtgtctgtgcccacaagctgtgcaagtatattgctgtccctgttatgaccctgagagcaggtggctgtgtctgtatattgctgtccatgtcgtgaccctgagagcaggtggctgtatattgctgtccatgtcatgacccggagagcaggtggctgtatattgctgtccatgtcatgaccctgagagcaggtggctgtgtctgtatattgctgtccatgtcatgacccggagagcagatggctgtgtccatatattgttgtccctgtcatgaccctggtggtaggcatctgtgacccactgtgtgtccatatatcgttgtccctgtcacgaccctgtgactactgtgactacgtctgagttcttttgagcatttcacacagtttccatcgagctccatgccatgacctctgttcccatgttttgatattgacaacccaccatgatttggttatctgaggacaagtgcagtgcctgtgcccgtttctgtgtcaaaactcttgtatccttacaatgccaccagctgtctgtgtcacacatcacacagccatagggtgataccccagtcggaaagccctcggggaactgccgggtcccttggcagcagctctggaagcagctggggctgagttttgcccagaggaaggtccaggatctcatgcacgcccaagaggtaccagagctttttctatagctgcacttgctttctggcaggtgaatgacgtgccattccagaacctgacacgggaggaggcagtgcagttcctgctggggctgccaccaggcgaggagatggagctggtgacgcagaggaagcaggacagtgagtgcgcgtggatatgggtgtgcctgtgtgttgcggggggaggacctggctgtgtggcctggtggtgagtgcagggatgtggttgaatctgcatctctgcaccctccatccctctccctggcccctacagggagagtgccccaaatctccagccaggcccactctcgggtggggagggctcagatcaggcagcagcccaggcagctcatgtggcctcccgctctccccagttttctggaaaatggtgcagtcccgcgtgggtgactccttctacatccgcactcactttgagctggagcccagtccaccgtctggcctgggcttcacccgtggcgacgtcttccacgtgctggacacgctgcaccccggccccgggcagagccacgcacgaggaggccactggctggcggtgcgcatgggtcgtgacctgcgggagcaagagcggggcatcattcccaaccagagcaggtggggactgtgtgctcctgcagtggggcacttctgcttcagcctcagtctccccgttagaaatgggctcgattgggctggacgcggtggctcaggcctgtaatcctggcactttgggaggctgaagtgggcagatcatgaggtcaagagatcgagaccatcctgggcaacatggtgaaacctcgtctctactaaaaatacaaaaattagctgggcgtggtggcacatgcctataatcccagcttcttgggaggctgaggcaggagaatcgcttgaacctgggaggcagaggttacagtgagccgagatcacgccactgcactccagcctggcaacagagtgagactcttgtctcaataaataaataaataggcatgatatcactgcttagcagtgttggtggttcaatctgaggaggtccacaaaaggctctgggcgggccccatttggtgctggtatgagcttcctgttgttgctgtaacagatgcccagaaacttagtggctttaaacaacacacacatcctcttacagttctggagagcaaaagtactaaagtcaaggtatgggcaggcctgggccctcccagaggctccaggagaaaaccaattttccacctttcccagagtctagaggggccgcatccctcagctcggggccccttcctcccccttcatagccacagcacagcctcttctagtctctctctgactctcaccctcccgcctcttcttgtgaggaccctgtgaggacatcgggtcccctgggtcacccaggatcatcatccacctcaatagcatcagtttaatcccatctgcaggccaggcacggtggctcacgcctgtaatcccagcactttgggaggctgaggcgggcagatcacgaggtcaagagattgagactatcctggccaacatggtgaaaccccatccctactaaaaatacaaaaattagctgggcgtggtggtgcatacctgtaatcccagctacttgggaggctgaggcatgagaatcgcttgaacctgggaggcggaggttgcagtgagcagagattgcaccgctgcactccaacctggcgacggagcgagactctatctcaaaaaagtaaataaataaataataaagattagctgggcgtggtggcgggcacctgtaatcccagctatttgggaaagtgaggcaggagaatcgcctgaacccaggaggcagaggttgtaacgagtccagcctgagtgacagagcaagactttgtctcaaaaaacccaaaataataataatagtaataataatcccatctgcagagtcccttttgccatacaaagtggcctgtccacaggctccgaggggtaggacgaggacgtctttggggccaccatgctgctgaccccagtgctcagtactgtcccctcttctccccagggcggagcagctggccagcctggaagctgcccagagggccgtgggagtcgggcccggctcctccgcgggctccaatgctcgggccgagttctggcggctgcggggtcttcgtcgaggagccaagaagaccactcagcggagccgtgaggacctctcagctctgacccgacagggccgctacccgccctacgaacgagtggtgttgcgagaaggtggggcccggagctggaggggccctggggaggcctcacacacagctcctggtgcacctgttcactaacattcagcctctaaaaggcacagtcttggcccggcgtggtggctcacgcctataatcccaacactttgggaggccgaggtaggaggatcgctgaggccaggagttccagatcaacctgggcggtaaagcaagactacatctctacctcaaatttatttatttatttatttttgtttttatttttatttttagacagagtcttgctctgtcttaggctggagtgcaatagcgtgatctgagctcactgcaacccctgcctccctgattcaagcgattctcttgcctcagcctcccaagtaaccgggattacaggcgcccatcaccccgcccccagctaatttttgtatttttagtaaagacggggtttcaccatgttggccaggctggtcttgaactcgtgacctcacgatccacccgcttcagcctcccaaaatgctgagattacaggcgtgagccaccacgcccggcctctacatcaaatttaaaaagatagctgggcatggtggtgcatacctatagtccccgctgcttgggaagctgaggcaggaagattgcttgagcttgggaggtcgaggttgcagtgagctatgatcgcaccagcctggcccacatggtgaaatcccatctctactaaaagtacaaaaaattagctgggcatggtggcaggcgcctgtaatcccagctacttgggaggctgaggcaggagaatcacttgaacccgggaggcagaggttgcagtgagctatgatcgcaccactgcactccaccctgggccacagattgacactgtcttcaaaagaaaaaaaaaaaaaagcatgtttctaaccactctccttctatcaaaaatacttttgggcctgggtgcggtggctcacgcccgtaatctcaatggtttgggaggctgaggcaggtggatcacctgaggtcaggagctctagaccagcctggcccacatggtgaaatcccatctctactaaaagtacaaaaaattagctgggcatggtggcaggtgcctataatcccagctacttgggaggctgaggcaggagaatcacttgaacccgggaggcagaggttgcagtgagcggagatcacaccactgcactccagcctgggcaacaagagcaaaactccgtctcaaaaaaaacaaaaaaacaaaaaaattttgggttattttaggggacagaaggacaggaagggggttcattccttaaaaatctatttgtgtctccaacagaaatatggtgcaaggcatgtagatagccttacaaaaggaaaaagaaatagcaataataataattttaataatttatcttctttgaccgggcgtggtggctcacgcttgtaatcccagcactttgggaggccaagatgggtgggtcacttgagcccaggagtctgggaccagcctggacagcaaagtgagactctgtctctacaaaataaaaaataaattagccaggtgtggtggtacgccagtagtcccagctacttggcaggctgaggtgggaggatcccttgagcccaggaggtcgaggctgcggagagctatgatcatgctgctgcactctagcctgggcaacaaagccagactctggggggaaaaatgcctcatcctgatttcaggaagggaagagattaagctcttatcagaggacagggggttaaaaacccaggtgcagcgattttccaaataaaaccacaaaaggggtgggaagagcaaattgcccgggacaggggtgggtggatggaccttgagaaaagcctttgacactgtcatcgcgctgctccaacatccagatgaaaacgtcctagaaatacaaggccacggccaggcgtggtggctcacgcctgtaatcccagcactttgggaggccgaggtgtaatcccagcactttgggaggtgggtggatcacctgagttcgggagttcgagaccagcctggccaacgtggtgaaaccccgtctctactgaaaatacaaaaattagccgggcgtggtggtgggcgcctctaatcccagctactcaggaagctgaggcaggagaatcacttggacctgggagatggaggttgcagtgagccaagattaagccactgcaccgccagcctcggtgacacagcaagactctgtctcaaaaaaataagtaaataggccacgtgcggtggctcacgcctgtaatcccagcactttgggaggccgaggcgggcggatcacgaggtcaggagttcgagatcagcttgaccaacatggtgaaacccagtttctactaaaaatacaaaaattagccaggcatggtggcgcacgcctgtaatcccagctactcaggaggctaaggcaggagaactgcatgaacctggaaggtgaaggttgcagtgagccaagattgcgccactgcactccagcctgggccacagagctagactccatctcaaaaaaaaaagtaaataaaataaaagaaagaaagggagaaagagaaggattaagttgcaaagaccctgggctaccacttttctcccctcaagacgcttctgtgactgtttcttcagtggtaaaatggtgtatctggtaggccaggtgtcaacatacttttcctgcaaaggatcacatagtaactattttaggctttgtgggctagtctctggcagaactactcagctctgctcaaaggtagccatagacaggacataaagaaatggttgtgactgtgttttgataaaactttattgacgaacacatgcagtgggccagatgtggccctcaggttgtagtctgctgacctatgagttagctaggttcaactgctaaaaagagaccctacagccaggaagaaagggaatgaaggcaggagaggggcttattcctgcccttgaaggcggaacccagaaatgtacacatcaattctgctagtgttccattggccattatttggtcataaggctaacctagctgcaaaggacactgggagatgtagtatttggctgggtagctatggtcctggttaaataggctgtttactataaggaagtggaggggtttgtacaacacactagcagtctttgatcgcaaatgggaccctgattctttcactgtgtctctacccctcagccagtttcaagcgcccggtagtgatcctgggacccgtggccgacattgctatgcagaagttgactgctgagatgcctgaccagtttgaaatcgcaggtgagaagccagatcctctggaaacctcgttggtgaaatagtttcacaactgtttttttgtggggggtcgggggagagttagaataatgatggcaaacatgaagcagatgggccaccagtgccccccccaatacccaagccagacatcctcaatccatcttggcaccgtttgtctggatagaacctccaaatccttcttaacacagttcaccaggtagccattgccaattgaggcaaagtgccacctgttatttgtttaagagaaatttattgatcttctgagacagcagtgaacacgacaggcaaggtcccttggagaagactccaaattaacaactgtagaaacaatggccgggtgcggtggctcatgcctgtaatcccagcactttgggagtccgaggcgggtggatcacgaggtcaagagattgagaccatcctggctaacatggtgaaaccccgtctctactaaaaatacaaaaattagctaggtgtggtggcgcgtacctgtagtcccagctactcgggaggctgaggcaggagaattgcttgaacccgtgaggcagaggttgcagtgagccgaggtcatgccactgcactccagcctgacgacggaatgagactctgtcaaaaaaaaaaaaaacaaaaacaattaagatagactaggaggccgggcgcagtggtcaggagttcgagaccagcctggccaacatggtgaaaccacatctctactaaaaacacaaaaaattagctggacatggtggcgcatgcctgtaatcccagctactcaggaagctgaggcaggagaattgcttgatcccaggaggcggagggtgcagtgagcagagatcacgccactgcgctccagcctgggtgacagagggagaccctgtctcgaaataaaaaacaaaaaatagttaagattgcaaattttggctgggtgtggtggctcacatgtaaaatctcagcactttgagaggccaaggtgtgaggatgacttgagcctaggagtttgagaccagcctgggcaacacagcaaaatcacgtttctataaaagaaaaaagaatttttttaattaaaaaaagatgcaaattttatgtcttttttttttttttttttttttttttttttgcatcagagtcttgctctgttgcccaggctggagtacagtggcaggatctcgactcaccgcaacctctgcctcccaggttcaagtgatcctcctgccttagccaccctggtagctgggattacaggcacgcgccaccatgcccggctaatttttgtatttttagtggagacaggtttcgccgtttggccaggctggtctcaaacttctgacctcaggtgatctacctgcctcagcctcccaaagtgctgggactacaggcatgagccactgtgcccggccaattttacgtttttaaccacaaaaacaaaaaggggggatgagatcacgtctccctccttgaacccctccatgccaggctatgtctccttcctgaaactttgcacgatccaggagggcttcctggaggaagcagtgctcctctcaggtcctagaagacagataggggcaagagtggagtttcctgtggggtcgtagcctgagcagagccctggagttggaactgagtctgggagagccaggggctgcagctcaggctcagcatcaggcctctgaccctgcaaccctgagcaagtggcctgttgtctctgagcctcagtttccccacctgccacataggccagtaccagccacccactcctcaggaggaggagggggctgaggtcaggaggggatgtgagtgcagtgcctggcacttggccaacatgagtttctgctgctgttaggatttctctccagggcaatggggagccatggtggcttcttgagcaggggaggggcaggtaggcatgaatttgaggggacgggggctgccctcctgaagctgctggtcctctctgccgtccacagagactgtgtccaggaccgacagcccctccaagatcatcaaactagacaccgtgcgggtgattgcagaaaaagtaagccgggtcctgctacgggtcccatttcatggatgggggaaaccgaggcctgggcatccaactgaatgtcctgacctgttctcagcccacaccccacaagtgcagtcttccatagagccccttttggaggctttgtgaggcaggaggcccgagacagacaagggcttctcggagtcaaacagcagccagccctgggcaaaggcagagagactcaagttgaggttttgatgcccaagatgctgcgacctgggctgttaccacccccatccccaacttgctagcctgtggatgtgagaggctggggtccactctgacctcagactcttcatctttctatctttctctctctgtttaccctgctgcaatccccctcaccccaacgtccgccggcctggcccaggacaagcatgcgctcctggatgtgaccccctccgccatcgagcgcctcaactatgtgcagtactaccccattgtggtcttcttcatccccgagagccggccggccctcaaggcactgcgccagtggctggcgcctgcctcccgccgcagcacccgtcgcctctacgcacaagcccagaagctgcgaaaacacagcagccacctcttcacaggttggggggtgggtgtcccagggtaggcgggtgggccccagcctgagtctcctgcacacactgacgtcccctccctgcagccaccatccctctgaatggcacgagtgacacctggtaccaggagctcaaggccatcattcgagagcagcagacgcggcccatctggacggcggaagatcaggtactgccgcggtgtgggtgggtcgggcagggaggccccacagacgctgtgcaggcccagctggggtttggggcctctgtcgggagttagggcttggtcagggatcaggactgtggccagagtcaagatgggacctgagacaagggtgttggactggaacttgggtgagatgagattggaggagctgttttttgttgtttgatttgagatggagtctcatgtcacccaggctggagtacagtggtgtgatctcagcttgctgcaacctccgcctcccgggttcaagtgattctcctgcctcagcctcccgagtagctgggactacaggcgagcgctaccaggcccagctaatttttgtatttttagcagagacgaggtttcaccatgttggccaggctgggctcaaactcctgacctcaggcgatccacctgcctcagcttcccaaagtgctgggattacaggcctgagccaccgcgcccagcctggaggagctgttttgagaatggagtcagtggggcacgggagctcacgcccatggtcccagctactcaggaggctgaggcaggagaatcacttgaacccgggaggcagaggttgcagtgagcagagattgcgccacagcactccagcctggcaacagagactccttctcataaaaaagagagagagaatggagtcttctcttggggctggagtcaaggtttggggctcagcttggatttgggggctgagcctctcaggtgaagggtcaatggatacaacccatcctggagtcaacagagaagcctccactgaggctccaggctccaggctcctcgccttgatttgggaccagagtttgaaggtggggggatgtcgtgggtggcagctggggtcctggccagggccagccgcagcatccacacccaccccacagctggatggctccttggaggacaacctagacctccctcaccacggcctggccgacagctccgctgacctcagctgcgacagccgcgttaacagcgactacgagacggacggcgagggcggcgcgtacacggatggcgagggctacacagacggcgagggggggccctacacggatgtggatgatgagcccccggctccagccctggcccggtcctcggagcccgtgcaggcagatgagtcccagagcccgagggatcgtgggagaatctcggctcatcagggggcccaggtgcgtcggacatggggggcaggcctgggaagggtctccggaggggatgccagcacagagcagacacacactgggagcctgttttctaccaggacgtcaacaaacacggcttccctggtcagactggtttctgggactcagacctggggtagctgagacccacgtggcactgagtaacttgcagcattttttttttttttttttttttgagacgcagtcttgctctgtcgcctaggctggagtgcaatggcgcaatcttggctcactgcaacctccacctcccaggttcaagcgattctcctgcctcagcctcctgagtagttgggattacaggcacctgccaccatgcccggctaatttttgtatttttagtagagacggggtttcaccattggtcaggctggtcttgaactcctgaccttgtaatccacccgccttggcctcccaaagtgctgggattacaggcatgagccactgcacccaggcttttttttttttttttttgagatggagtttcgcttttgttgcccaggctggagtgcgatggcgtgatctcggctcaccacaacctccgcctcccaggttcaaacgattctcctgtctcagcctcctgagtagctaggattacaggcgtgcaccaccatgcctggctgattttgtatttttagtacagacagggtttctccatgttggtcaggctggtctggaactccagcctcggcctcccaaagtgctgggattacaggtgtgagccactgcacccggccttttttttttttttttttttttttttttgagttagagtctcgctctgtcacccaggctggagtgcagtggcacgatctgggctcactgcaacctcggcctcctgtgttcaagcgtttctcctccctcagactcccaggtagctgggattacaggtgagcaccaccatgcccagctaatttttttttttttttaaggtattcttagtagagacagggtttcaccacgctggccaggctggtctccgattcctgacctcaggtgatccacgtcggcctctcagagtgttgggattagaggcgtgagccaccgcacctggcctccagccaacattttaacctctctgtgcacctgtttcctcatctaggacacagggtggatggtatcagacttggtggcacagggcggtggtgagcactcaatgtgctcagcccaagttttggcacatagtagttgcgtgtctttttgaacttgacctatctaatttatatattttattttttaaattttagagatagggtcttgccctgctgcccaggctggagtgcagtagtacaatcatagttcgttgcggcctccaactcctgagctaaagggagcctctcatctcagcctccggagtagctgggaccacaggcgcgcaccaccacccacacccagctaattttttttcattttttgcagagatgtggtcttgctatgttgcccaggctggtctctaactcctgggctcaagtgatcctcctgccttggcatctcaaagtgctgggagtacaggcgtgaaccacagcgcccagctgtagttgggtgtttaacagtaacaaatgtgtatgtagctcttagtgtatatgcctcagcatcttcttccacaccctctctaggtcaatgtaaaaatctatgaatcaatgacatctctgattagagtgattttcctggggttgtgcagtacccaacctgctcaactgtccatggcaggctgcatacggagcagccactgtactaagtcctttacgtacatgaactcatggctgtggccctgtgaggacttgcacagatgagaaacccaattccccttttgctgacaggctaggaggtctcagctaaggccttcccctatcccagcctcagttttctcatttagatttggggatgacctgcagacttgtcacggggttagcaagtgggcagcatggcccgggccaaggtgggggatgggatggaggtggttattgatctcgactcaccatgctctggggggagttttgaagctcctctctccctctcctccaaggtggacagccgccacccccagggacagtggcgacaggacagcatgcggtaagaaccccatattccagattggggccctcaacccttcccttgggactcagactctgcggactcagatctagatccaagctatgccttcatggtgcccctagcctagtggggaagacagagcctgccagagcctctctaagccccatataatcagggccaagggagtaggaatccacttcctgggaggcctaggaaggcttcttgaagggcaggatattgcagctggggctttgagggatgcataggagtttgttaacaaggccctacccatgaatgcccagatgtgcttatctctgcccacacccactgtgcctagcacagccagcctcagtttatggtgagaaagctcacacccttcccacccacagcatctattctatttcctgatccccagaacctatgaacgggaagccctgaagaaaaagtttatgcgagtacatgatgcggagtcctccgatgaagacggctatgactggggtccggccactgacctgtgacctctcgaaggctgccagctggtccgtcctccttctccctccctggggctgggactcagtttcccatacagaacccacaaccttacctccctccgcctggtctttaataaacagagtattttcacagcaccggcttctagtggcttccaggaaggacaaggtcctcggtcccgtagaccctgatccgagactttgccaaatgcataagcttttactgtttttatattaggaaatcatacaggaccaagaaccgctggggtcctggccagccagggcaggcccaggatggggctccggggccatggaggcgaaggcacagtggcaggcaagggatgaggtggtcacaggtacacgggctgctcctggcctgtaaggaggcgatatgtggcagctggcatcgtcttgatatgcacctggggagtggaggcggaacggggctcagggcaggcctgggctcgtgggggacgtgggggcgcccctggccaccacccaccacccgcacacctcgccataggcctcggtgagcagctcgatgatgcgggcgtgtggcgtggccaccacactctgcccattgatctcaatgatgcggtggccgacgcggatgcccccacgctcggcgatgccaccacggaggaggctgcagatctgggggagaaaagagggggacgggaaagaggtgggggctgctcaggggccgtgctcagggccgccctacccccccaccccggggccaggggccggggcctcacgatgccgtcctccacgcagaagcccagctgctcgcgggcgtggggccggtggatgatggcggtggtgacgggagggcagtggacgatgctgagtgtcaccgacgtctgcgacttcgtctcctgtggggcgggggccgttggcctcactcagctgccggacagcctggcaggttgtagccccctctgggcctcagtttaccctctcataaaccagagacctggagtccaggggctcaattctggaagaccccctcagatgtgatagagaacagactcgggcccggtgggcatggggtcgaagctgtctgacccgagccatatcgcttccttatggccaaaagccaagccgacagccgggctctccaggcaggctgcaaacatctgtaagaggctgcacggactgtggcctcattcctctgacgggggcaggtccctccctatctctgggcctcagtttccccatctgagcaacaaaggttgagactcaaaaacatggccaggtgcagtggctcacacctgtaatcccagcactgtgggaggccgaggcaggtggatcacttgaggccaggagctcaagaccagcctggccaaccaacatagtgagactccatctctacaaaaaataaaacaataaactgggcgtggtggtgcacacctgtggtcccagctactcgggaggctgaggaaggagatttgcttgagcccagaaggtcaaggctgcaatgagccaggtgcaccgctgcactccagcctgggcaagagtgagaccttgtctcaaacaaacaaacccccccagaaattagctgtttcttgttagagagagagagtggcccagccctggagctgggccacccgcatttccatcctggctctggtactagggaggtgccctggacaagtggcctcccttctccaggcctcagtttccccaagggcacaccagtgggcaggacttaaaagttcgactttgtccctcctggctgggctggagagacctggccagggaggagacctctctgggactcagctccccttcctgggagtgtgggggccctgccacaccaggaaactcacgcggacagcggcctggcacgcagccaggggcagccccaccaggctggtcccgttgatggcggtcaggcggtccccgatgctgagggcccccgagcgctcagcaggccccccgtgcagcaggttggcgatgacggctgtgggcagcagggagccccagcccgactccaccagggccacgcccaggccctcccctcgccgcttctcgaggtgcacctgggacacacagggggcgcggaggctgctcagcagggcccggtgcaggtgcacgggtgtggggggcaccaggtgggggctgcccagcacctcactcacctcccggcagttgtcactgttggagaagtggtccaggtccccattatggaggtggcaggcgcctgggctcgggtgcacgcccacctggctggggtcaataccgctttcccgtaggaactggctgtaggcggcggcgaaggcctggccaatggcctgggcgatgagctgggcctgcggggaggagtggcgcgtccctggggtgtcccacccacctcctccaggtccccaaagtccccagggtcctcagagctgagccctcctgtccccacctggggtgagagtcccaggacacagccttctgccctggggctttgggggaggtggagagacagccgcatcttggggaatctacggggagaaggaaggggaggggcagccctgggctggggggacgatgagggaggcagctccctgcgcatgggctgtgggaaaagctatcaaagacccagccagggggcctggggcctcatgggtggcagggacagcccaggagcgggcaaggtttcggggagtcggccgagagtcttggagtcttataggaggctggacgcggtggctcacgcctgtaattgcagcactttgggaggctgaggtgggtggatcgcttgagcccaggagtttgagaccgtgttcacctgggcaacagagcgagaccgtgtctctataaaaaatacaaaaattagccaggcatggtgataccccggtggtcccagctactagagaggctgaagtgggaggatcgcttgagcctggaaggttgaggctgcagtgaactatgattgcgccactgcactccagcctgggtgacagaaggagaccttgtcccaaaaaaagaatttaaaaataagcttatgggagggaggttaaatgcacggcccactgagggaggcgacagttgcagtgaggagggcctcaggagggtggccccgcgccctggctgctcacgtcctccgcgtagaatacgtggcagagcatcttgtagaggcggcggccgtggtcctggggtgccggcctccgtgccagccgccgccgcgccatcagcaccagcacgcagccgatgtcggctgtgtaggagatggtatgcagggcgtggtccatcatggcctcctggggcgggagaggcagcctgggtgggttggggggccgtgccaggctcgatcaccccacccgcatccctggggcgggtccctgccccgtacctgggagtccgctgtcaagaccttgatcctcttggtggagacgaacaggtccacctccgtcatgggctgggtctccccatcgggggcctgtgggtggcggcgtgggaggtggaggcccccacagacccagcctgcagcccacccgcctgcccgcccggccccggccgccccctcaccttgacgcggtccatggcctcccgggcctgggccatgcgcgtgctggtgggcgggttccgttccgacaccagctgggtggaccccaggtacctggccccaaatatgacaccgtccaggaggtcttcatggtcacagggaccaggcactgagggcgacagcgaagagggtcggcccccaggggcccactcccacaggctctgccccagggctacgctctccgagatggccgggagacacagtgttctagctggtggcttagcactctccagccaggaagcacagcccactgttctagaaccatccaagcagcctggccctcacaggtctagaaccttctgtccatccctcaaggactcgcaggtgggaaaccagtgagtccaggccatggctggattcaaagccagatctagcacccacagataccttcaccccgtgtccccagaattccatgatcaggccggaaccagacagtcccactcctgcttttttgagacacggtctcgctctgtcgcccaggctggagctcggtggtgtgatctcagctcactgcaacctccgcttcctgggttcaaacgattctcctgcctcagtctcatgagtagctgggattacaggcgcccaccaccacgcctggctagtttttgtatttttagtagagacggggtttcgccacgttggccaggctggtctcaaactcccgacctcaagtgatccacccgccttggcctcctaaagtactgggatgacaggcgtgagccacgacgctccaccccccactccaatttcgaaacctccacaacattctagaaccacagtggacccctgcttcttggttctggaattccctccatcaatctagaactggccagctctgcccactgttctagaaccgtctgcagtcagcccaggatagcaggcagctctgttcccgggttgtagaaccactcagaacagagacagaccctgctgcctgtctaaaattcccatactctccagaaccccagctggttctgacccttgattccagaactctctgacaggtctcatagcaattctgtcaggagttttagaatcttattatcactctagaatcagacttctctgctccgtgattccagaacatcttaatcacaatcgcgtcaggcagctcttcctgtggttctagaatctccttcagtagttcacacctttggctacaccagggattctaagaattacctgaccagtcaaggaacaaacaattctgttccaggagaattctagacagttccagaatactcccaacccagcccagaactacataaagctttactcctggctgggtgcggtggctcacgtctgtaaccccagcactttaggaggccggggggggggggtggatcacctgaggtcaggagttcgagacctgcctggccaacatggcgaaaccccgtctctactaaaaatacaaaattagctgggcgtggtggcgcgtgcctataatcccagctacttgaaagctgaggcgggagaatcacttgaacccaggaggtggaggttgcagtgagccgagagagatcgcaccactgcacaccagcctgggtgacagagcaagattccatctccaaaaacaaaaaggaaaaaaaaaaaaaagctttactctcatggttctagaattccctgagctacccagagccagacagctctgccagtggccctagaacattctaaccagtaactacggctctttggtttagaaccacgggtgtagggccccgttctggacaccactaagtgaaattcaccctacaccacagtcggttctgcccactatccttcaggatctaagcattctggaacaagagctccactctggggttctagagagatacgtcattcactgtggtagccaccaggcacatgtatctatcacagacttgaaatgtggctcgactgaatagagatgtaaatagaaaatacacactagatattgaagatttggtatgaaaaaaagtaatttaaggtcaggcatggtggttcacgcctgtaatcccagcactttgggaggcagaggcgggcggatcacctgaggtcaggagtttgagaccagcctggccaacatggtgaaaccccgtctctactaaaaataccaaaattagctgggcatggtggcaggcgcctgtaatcccagctactcgggaggctaaggaaggagaatcacttgaacccaggaggcagaggttgcagtgagccaagattgcgccattgcactccagcctgggcaacaaggtgagactgtgtctcaaaaaaataaaaaagtaaattaaaaatattgattgtatgttgaaataatattttaaatatgttagcttaattaaaatgttattaaagttaatttcttagccaggtatggtggcgtatgcctatagttccagttactcaggaggctgaggcgagagaatcgcttgaagctgggaggcggaggttgcggtgagctgagatcgtgccactgcactgcagcctgggcgacagagcgagactccgtctcagtttaaaaaaaaaaaaagttatttcacctgtttttaattttttaacgtggataactacaaaattttaaatcacatatggctcacgttgtatttctattgtagttccatctagaactttctgattacactataattggacagctctgcccagggttatagaacactagataactattccctccatggttctagaattctccagtctgagtagaaccagatgcctctgttcaccaattctgagcattctcatcagcccagattcctttaccctagaaacagacaaaatgccaagccctggaactccctaggtgtcacagctctgctcgattctagaaccttcttagagctataggttcaaaccagtttttctctctgcaaccacagaactgtttttttttttcttttttttgagacatggtctcactgtcacccaggctggagtgcagtggcacaatcttagctcactgcagcctcaagtgatcctcccacctcagcctcccaagtagctgggattatagacccatgccacgtgcctggctaattttggggggggattttatttttgtggagacagggttttgctgtgtggcccaggctggtctcgaactcctgggctcaagcgatcctcccacatcagcctttcaaagtgttgggattacagatgtgagccacccttcccggccagaacttactatctgacctatatccttagcgaagtgtagaacagaggctggccgcggtggctcacacctgtaatcccagcattttgggaggccgaggcgggtggatcacaaggtcaggagtttgagaccagcctgaccaagacggtgaaacgccgtctctactaaaaatataaaaattagctgggcacggtggcggacgcttgtaatctcagctactcaggaggctgaagcaggagaatcacttgaatccgggcggcagaggttgaagtgagctgagattgcaccactgaaaaaaaaagtctagaacattccagagggccagaaattgttcttcccatgcttttagggcagggcttggcaaacattttctgtaaagggccaaagagtaaatattttcagccttgtaggtcacaaggtatctgctgcagctactcacctctgccattcgaacatcagagcagccatggacaacacatgaataaccaagcatgatgtgtaccaataaaactttatttatgtacactgaaatttgtttttctttttttagagacagagtctcactctattgcccaggctggagtgcaatggcgtgatctcagctcaccgcaacctccgcctcccgggttcatgtgattctcctgcctcagcctcctgagtagctgggattacaggcgtgcactaccatgcccggctaatttttgtatgtttagtagagacggggtttcaccaatgttggccaggctggtctcgaactcctgacctagtgatctgcccaccttggcctcccaaagtgctgggattataggcgtgagccaccgcgcccagcttatgcacactgaaatttgaattgcatttttttatttttgagacagagtctcgctctgttgcctaggctgtagtgcagtggcgtggggtgatctcagctcaccgcagtctcgacctcctgggctcaagaacttctcccgcctcaacctcctgagtagctgggactacaggcatgcaccgccacacctggctaactttaaacattttttgtagagatggggtcttgctacgttgcccaggctggtctccaactcccggctcaagcgatcctcctgcctcagcctcccaaagagctgggattacacgtgtgagccaccatatccagcctagcatatcattttcacatgtcaagaaatagtattctttggccaggcgtggtggctcacgcttgtaatcctagcactttaggaggccaaggcgggcggatcacaaggtcaggagttcaacaccagcctggccaacacagtgaaaccccatctctactaaaaatacaaaaattagctgggcgtggtggcgagcacctgtaatcccagctacttgggaggctgaggcaggagaatcacttgaacccgggaggcggaagttgcagtgagccgggatcacgccactgcactccaagcctgggtgacagactctgtctcaaaaagaaagaaagaaatagtattcttctttcaatgaaaaaaaaagtcaattaaaaatgcaaaggacacccgggcatggtggctcacgcctgtaatctcagtactctgggaggctgaggcaggcagatcgcttgagctcaggagtttgaaaccagcttgggcaacatggtgaaaccccatctctacccaaataaatacgaaataaaattagctgggcgtggtggcacgcacctgtagtctcagctatttgggaaactgaggtgggaggatcgcttgaacctgggagatggaggttgcagtgagctgagatcaagccactgcactccagcctggataacagaagtcatcaaaaaaagtaaagaagccccaaacgcaaaaaccatctttaactcgagacctacgtgagcaggcagtgagttgggtctggcccgacgacgatgatttgccaagcccggttctagaacccagtgctgccaatggccggagctgccccacagtccccttctcactctaccccgttctcaaggctggctctcctctccctggccagccggaatctgctcgaaaccaccctcagaggctcccgagaacctcgtccttactggcaagctgttgccaggctggtgagcctgattctggctgtctaggggccttcagtgcctgaggctagggtgggcgggacactcaccctcctggggggcagggtaggaagccagggtctcggggctctggaagaagatagaggaggggcaggactgagtctccctgcttggttccaggcagtccaggatgcctggagggcggggcgggcactacctgggcaccagcgggtggctcttcaggtgtgactagaggcaccgtctccagccagggttccggggaactgcttgagctcctgctgccctcctgctcagcagaggccccctccacccattctggggagtcagaatcctcatctgggtcctcagggggctgcaacagtcggggggcaggctctagaggctcttcaggaccagtctgggaaggcgggcattcctcgcagtgcaagaggcccagcaggtcatcccggccagcttcggcagacaggagcccgtgggcatcagcaatctcctgggaggccaggccatggcctgtggcaatgtgtaggggacagggggctccacctggggatgggcccaccagatcgcctggcagagcttcaaactgctgcaccagctcctgaaggcttgactcatcaagttccatccgactgaggctgccggggcctcctggcatagggtcccactggctgtcaggggtgaggtcctccgaaggcacaagaatgtccctgggcccctccaagtccatggctggaggccccgaaggggatcgggaaattgtggggaagtccatgcctggactccaggcttaggccggcatcttcaggcagctgaaagagagagagtcagcactgaggtttcgcccgggtgcagtggctcatgcctgtaatcccagaattttgggaggcccagaagggctgactgaacccaggagttcaagatcagcctgggcaacagagcaagaccctctctctacaaaaaatacaaaaaattaaggccgggcacagtggctcacgcctgtaattcccagcactttgtgaggccgaggcgggcagatcatggggtcaggagtttgagaccagcctgactaacatggtgaaattccgtctctactaaaaatacaaaaaattagccaggtgtggtggcaggcacctgtaatcccagctacgcaagaggctgaggcaggagaatcgcctgaacccgggaggcggaggttgcagtgagctgagatcgcgccattgcactccaaggtgggcgacagacgagactatctccaaaaaaaaaaaaaaaaactagctaggggtggtggtgtaggctgtagtcccagctacttgggaggctgaggtgggaggatcacctgaaccaggggaggcagaggctgcagtgagccttgattgtgccactgcactccagcctgggtgacagagtgaggccctgtcttaaaaaaaacaaacaaacccgaaaaacaaaaaacttgaggtttcccggctgcctatccggtgctaggctctagctgggtactgttcatacagggcacataatttaatacccactaacccttgcaaggaagttaggattcccattttacagatgaagaaactgagccacagaatggggaggtgtgaggcagtggcttcccgagcccctgtgtcatcccagacctctctcaactaatggagtctgttcactccagccctggttcttccaggtcctcctccctcaagacgcggaacccaggctggagacccagacctcacaccctgactctaccgactggtcagaggcagttccccaagaccccagacccaagaccccagtcccatgacctcaacccccaatacctccatccagaactttagacccaggaccctggacttaataccagagacccaagacgccataaggcggaccccagtctccaaacctccaatgctaccccaagatcgactccagactcagaccccgacttcaggacccagccccaagcccagaccctagtcccccctcagaccgaagacctcaagcgccgactcagactgcgctctgcacctcgaggacactcacttcccaaatcgaggccgcctcagccccgcgcagcctccaggaccccgctccccacggacggccccgacgtagcccgggccgcgtccccagaaggcgcagctcggggattcccggtcccggcgcccgctcctctatccgcgcagagccctggcccattgagcatgcgcggcctcgcgaggcctgctgggaaatgtagttctcccacccagcctcgccacgcgggggcgctgggacaactgcagatgttggaggggagttcgaatcccaggcttcccggcccgcagactgccccggctggccccaggacctgtttgttctcctgcaaaatagggttaataatcactgcctggctctgggggctgtgttcattattccaaaggatggcagatggggagaagtggggttgggaaatattaaagaagtgtgagaggtggtttccttgggaccttgaggcaccggaagcgtcgtggagaccctgttaaagacggactttcggtttggctcacagtagggagacacataggtgcaccatggatttggggtcggcctgggaactttacctccctgagaactcagtttcctcattataagctggggaaaaaatagtacctacctctcaattgtgaggattaaattagatcaagcgggttaaggatttagcagtagtagagctggaaaagaatatataaaatatatattattaatttatatattatatataaaacatactatatattatatgtattatatatgttatatataattttaaaaatataatgttataaaaattaacagtgattagactccagccctactggagtatattagactcattgttaatcttctttttttaactttaaagctttgaataattactcattggatggaatcaggaacatataaagtgtgatatttttagtaaatgttatgtaattgaagaagggcaagaagtcaatgaaatatcccttgaacgcctcctcctatagtaactgtgtatgtctacaaaagtctgaagaaatcaccatagattatgaaagcttgggagaccgcatttcccagacacctccacggggcctacacttccacggggcctacaactcccaaacacccttgggccactgacgtcttccggaaacgtgcacttgcaagctgcccgcaatacgtcatggcgaccaaacgccttttcggggctacccggacgtgggccggctggggggcctgggagctcctaaaccccgccacttccggaagactcctggcccgggattatgccaagaaaccaggtgagctgggttaagaggaaccaaatggggacggtgggtgcactgaggaattgacagtgcgcaggcggtggttggggaggtggtgctagaactgatgcgcaagcgcagagaggcggatgccaggctgtatgcgcaggcgcagtttgagggacccagcgccgcttggagctcgggcgtctggctcggagatactgtagcgattggacccagggcgcaggcgccagcttggggcggagcggcctgggaggaggatgtggttacgtggagaccacgcgtttcactgcgcaggcgcgggttggaaaggatttgaagggagtctggggaggtcatgaacttgggttccagttctgtttctctgcctgcctccaaatcgctgggtaaccttggccaagacgttaccaaacattcaaagaaattatggagcccgtttaattggccacttcagcaagaacaaaacaaggttattaaggtttagctggatacagccttgcctgatctcctttgttgaaagggggaaattgtccaatgttcggccttaaagacagacacatagcagacaaaatataacttgaatgacttggtcattccaagcatcggtgttacttaatgctatgtccaaatcccacttaaagttacttaatgctgtgtccaaatcccacttaaagtgatttcgaggccaggcatgatggctcacacctttattcccggcactttgggaagccaaggagggaggatcgattgcttgaacccaggagttcgagaccagcctgggcaacatagcaggaccctgtttgtataaaaaaaaaaaaaaattgcctggcgcggtagctcacgcctgtaatcccagcactttgggaggctgatgcaggtggatcacaaggtcaggaattcaagatcagcctgaccaacatggtgaaaccctagctctactaaaaatacaaaaattagtggggcatggtggcacatgtctgtaatcccagctactcaggaggctgaggcaggagaactgcttgaacccaggaggcggaggttgcagtgagccgagatcacgccactgcactccagcctgggcgacacagtgagactctgtctcaaaataaataaataaataaataaaaataaaaataagcggggcatggtggctcacaactgtgatctcagctacttgggaggctgaggcagaaggatcacttgagcctgggagtttgaggctgcagtgagccatgattgtgcccctgccctccagcctgggcttttattttttatttttttattttcttcagacggagtctcgctctgtcgcccaggctggagtgtgcagtggcgcaatcttggctcactgcaagctccgcctcctgggttcacgccattctcctgcctcagcctcccaagtagctgggaccacaggtgcccaccaccatgcccggctaatgtttttgtatttttagtagagatggaatttcaccatgttagccaggatggtctcaacctcctgacctcgtgatccgcccaccttggcctcccaaagagctgggattacaggcgtgagccgccgcgcccggccgggctgtctttattttttaattttttagattttttatttttttgagatggaatcttgctctgtaacctaggctggagtgcagcgatgcgatctcagctcactgcaacctccgcctcccgggttcaagtgattctcctgcctcagcctcccgagtagctgggatcacaggcatatgccaccatgcccagctaatttttttttttgtatttttagtagagacaagttttcaccatgttggccaggctggtcttaaactcacctgacctcaggtgatcttcccacctcggcctcccagagtgctgggattacaggcatgagccactatgcctggctgagaccctgtctttaaaaaaaagttttgagtggccgggcgcggtggctcacgcctgtaatcccaacactttgggaggccaaggtgggcagatcacgaggtcaggagatcgagaccatcctggctaacacggtgaaaccccgtctctactaaaaatacaaaaaattagctgggcgtggtggtgggcgcctgtagtcccagctacttgggaggctgaggcaggagaatggcttgaacccgggaggcggagcttgcagtgagctgagactgcgccactgcactccacctgggcaacagagcgagactccgtctcaaaaaaaaaaaaaaagaaagttttgagtgtagcagagtccagccaggggcagaggccacctgagacagggttctgtgagagaagtttggcttccagaggaggggctgggctgaaatgactctccctctcgtctccccagttatgaagggggccaaatcgggaaaaggtgcagtgaccagcgaggccctcaaggaccccgacgtatgcacagatcctgtccagctcaccacatatgccatgggcgtcaacatctacaaggaagggcaggatgtacccctgaaaccggatgctgagtaccctgaatggtgagtaggccaggctgtgtcatcctgcaatgactattccttcctccgccccaggaggaccccttcccggagaggcggatcgccactccagccggagcctaatagtcacacctacccatcctggctttagggcagggggcttcagggctctgcccatctgtaatggggtgatgggacccatccctccctcagagggctgtgaggaattcatgagattagaacacatgtcaagtacctaaaacaatgctttatcttaagcaaatacttaaaaaaaattttttttcaggctgggcgccgtggctcacacctgtaatcccagcactttgggaggcaaggcgtttggatcacctgaggtcaggagttcgagaccagcctggccaacatggtgaaacctcgtctctactaaaaatataaaaattagccgggtgtggtggcacattcctgtagtcccagttacttgggaggctgaggcacgagaattgcttgagcctgggaggcagaggttgcagtgagctgagatcacgccattgtactccagcctgggcaacagagtgagacttggtctcaaaaaaaaaaaaaaaaatttttttttttcttctatatggagtcttgctctgtcacccagtgtggaatgcagtcatgtggtcttggctcactgcaacctctgcctcctgggttcaagcggttctcctgcctcagccttcagagtagctgggattacaggcatgcgccaccatgcctggctaatttttttttttttttgagatggagttttgctcttgtcgcccaggctggagtgcagtggtgtgatcttggctcactgcaacctccacctcccagtgttccaatgattctcctgcctcagcctcccgagtagctgggattacaggtgcccgccgtcacacccagctaatttttgtatttttagtagagacagggtttcaccatgtttgccaggctagtctcgaactcctgataacctcgtgatccgcctgccctggcctcccaaagtgctgggattacaggcgtgagccaccacgcctggcctaattttgtatttttagtagagacagggtttctccatgttggccaggctggtcttgaactcctgacctcaggtgatccgcccacctcggcctcccaaagtgctgggagtacaggcgtgagccgccgcacccgtcctgcaaatacttattgaccactgactgcatgccaggccctgctctaggcttgagggatacagaagggctcaaaacagacacaagtccccaccctggcggagctagctggggaggcagacaggaaggaggaagtcaggcagctgtggtggtgacacttccaggaagggggcaggagaatgagggacagagccggggtgtttggctgctctagtttgaggtttgggggacacagaagccaagacgggagtgggtggaaggggctttccaggcagtgggcacagcctgtgcaaaggccccggggcaggaccgcacctggtgtgctggaggaacagcggggaggcctgtgtggctggagcacagtgaggagggcgagagagggaggaggtgagggcaggacctgtgggctgcaggaagggttctgctgtggccccaagctgatctgaaggctggggagggtcaggaaggctgagcaagtgggggcaggtggcatgatgtggacagtgctaggaggcaggagagggcttggcgtgtgccagcctcagatgtgccactgggatggggttggctccattgctgcatggccagggacccacccagcccagggtcggggagggaccaccctgagatcatgcagccaaccagtgggcctggcacccagccccgtcgccgcctctgcccgaggtgcccgggacaccagggagcccaggggtcaccgtgtagctctgattcctgcccgcacccccgtcaggctgttcgagatgaacttgggtcccccaaagaccctggaggagctggaccccgagagccgggagtactggcggcggctgcggaaacagaacatctggcgccacaaccggctgagcaagaacaagaggttgtagcatggagggcccggcatcgctgacccccacgccgagggcttgccgttttcccggaggacgtggacttttgtgagacaagaggcggctccccagcctgggtttccatgtgaccccacagtggggctggaccagggccctggaggccaataaagagctttctgggtagaccctatttccccttggtattgtctggtgtcggcctggcgggaagtgggtccctcagaccccagggatcccagcctccaccccagccagtggtgggccgtctgcaggtcccctgtgcctccggcccttggtgggcttctctccccaactcctggaattcctgacactgctcacgaggccccggccccaaatctcaagttgctgggtgagggggttgtcctagctaagccactcttggttgcaagggactcaaacctaactatctcaagccatcagagtcagaaaagaggctttatgagcttcaagaaaggagatgtccggagcgggtagtggtgtggctttaggtgtggctggatccaggtgcttcggtattcagacccaaggctctctccatctcagggtccttggatcccccaggggctggcactcatgggcagggtagcccgagggctcctggccgacgtccccaccagcgcagcaagtagaatcagagggaagggactgccccttccttcctgctgcagtcacagcgtggtcctcactggcctatccctggagcccaggggcttgggccttccttccccacccccaagtcctctgtccactccactggagcccaggtctcaacctccgcccccagtccaccctctggagtcggctttcggcaccctgaccctgacccagggtctgaccctaggcctgagtgaggactggcctccctgcagtcccaacaactcctgccctgcctggctgtgatggggcgggatcacgagggctggagtccaccagattagaggaggctgagggtgacacgtagttagggagtgatggggcctcttgctgggggtagatcacctcatggaccccacgtcctgcagaacccccaagggtcatgccctcggccccacccttgccacagcagccccacccatgcctaggtgggtgccctgggggatttggactgggctcacccaccctccggcttcctctgtccacaagctggatgggcggggcggggcccgtctcagggaaaccctaaccttcatcctcttaggggactctggagtggaggggattactgcgcacctgctgtccccggcggcctccctgggcaggcgggggtgtgagcgcgccttctctcgcgctcactgcaggtggtgccagccgttcccaccctcctgttgttccccaaggttctgagggtaaaaatcaaagttataacagccactggccctgcctggcctccccatcacctccctcctccccctcctcactctgctccagccgcatgggcctcctcgctattctttcaatgcacgaggcgtggtcctgccccagggcctttgcacagcctgtgcctctgcccagctccctccttccctagaccttctccctcccgcccccggtctctaccttcacgccagcctcccctcctccagaactccctattaaaattgcagcccctgccacactccacatctgactttcctggtttttttttctccctatcacttatcactgtctgaagtcttttgttttagatttgttttttatttgtattgagtcagggtctggctctgttgcacaggctggagtgcagcagtgtgatcacagctccctgcagcctcgaccttctgggctcaagtgatcctcttgcctcagcttcttgggtagctgggatgacaggtgtgcaccagtacacccggcacattttaaaaacgtttgtggagatggggtcttgctgtgtcacccaggctggtctcaagcaatcctcccacctcagcctcccaaagcactgggattacaggcatgagccaccgcacctggcctggtttagctttaaaaaaaaaaatctttcttgtgcttactgccgtgtccccactgcctggtgtgcggtgacattgggtgatggcggggcgttggaccacaggactggtgtgtgaggtgccgcctagagatggggtgacctggtgatctgggagtgatctggggagcccaggctggagacggggagggtagctactgcagctcctgccctggtgccgcacttctgtcccgggaggtggcgctggcccagactgtcccatcccatgcctcagggccccctcctgctgcactgggccagccgtgcttgccagtcccagcgggttctcggccccgcgacagcctccttgctcagagctcttgggcgatgcggctgggttggacagagcagatgctggccatgcctccactggggacatgcacagggcctggggtctgtggggacgtgaggaacggtctgacgatgacgacacacccagcatcagcccgcctccacctggaggcccaccagcacctggcccgggacccaccctctctccagaacctgtcgctgtgccccggacggtaggaccggtgatgggtctgaaaggcagctccatccactcctggccgtgcgactttggggacctggcttcctgcctaagccccggtttccctctctatagaatgggctgacagctgtgcccgaggtccagggcacaacggagaggggagtgctcacatggcgagcacacggtgagaggagaccaggctcgcgggagctgctgctatttgttatttccaggggactgggagcctggagagtgggcagctctgctgatggggattaggagaagcagagagatttacactcatcttacagagtcagcggtcccgccacccacagcctcgcagccctcgaacctcggaggcccccacgcccaattaacagacaggagactgaggccccaggaggggaggaggtccccgcacctggcctgagaatacttgggtcacctcctgcctgacactgggggccagtccgctgccagcaggacgggtggcgatggggtgggagacgggatgggggcagggaacccagcagcctgtctctctggtcccgctccccagtggtggtggcctggcctgaccacggttgctccatgacctcggcctaggccaaggcgtggtggctgtcaccagggcacgtccccggttctcgggttgggccgaggagggggcccgggagggcggcaggctcaggctggcggccaggccctgtccagagcctgtgcatgttccttggccagcagccgcagggacgcctcctccagggcgaagccatctgcgaaggtgggagcaaaggcatgaggcccgaaggacgcttgcagccccgggcccgggcccaggaggcgggggaggcctggcacggccggcggtccggggcccaaccagggctccaggggcagcgacatggccggggggcgggcgaacggcagcgctggggcctcggggagtctcggagctgccacggcacccgagcctgactccagccgctcctggcggcgccacttggcccggcggttctggaaccacacctggagggtgcgagagggaaggggggttgctgtgagctcagccgctccccgccaatcctcggaccccctctgcacaccccagccctgggggttctgactcccgtctgacccgactcctacctgctgcttcgctgttctgccccaagaagatgaggatctcccaagcgttccctaagcccaggctcccctccaactcctcactcccctccttggcctcccttggcccttagcaagtaacctgagctgcctaacgtggcattcaaggccttcaaaagcgttgttacccacaccattctctgcctcctccttcacccctggctcaagggaaacgcctccaacttaacccctccatgtctttgcacacactgttcaggatgcctagaaaaactccccttttccttcccagctggcacactcctactcaaatgtcaaaacctcagctcccacaccccctcctccaggaagccttcctagcttctcttctgctgttgctccgggagggtcaggatcttgctttgcctccctccccaggttgcaaaagatgtgtgtgttggggggtgccctcacctgcacgcgcacctcaggtaggtgcaccttggctgccagctcctcacggctgtacacatccgggtagtgagaggcctcgaacgcccgctccagctggtgcagctggtaggtggtgaaggtggtgcggttcctccggtgcttcttcttgggggcctcctcgcccggccccagacccccaccctcggttgccggcccctcgcccgggctcaggaacatggctcccacctggtgggacggcagcgggacagatggtggggagacggctgggggggctaccggcagggacagggcaggggagccccaggcttgcctcccggctccggggaaatcggttccctccactggggccggcatgcgctctgcatccccaggctgtcctcctcgggcttgggggggtctcctgctgtgcctctgtctgctcttccttctctctgtgtgtgtcaccgtccctgttttctcttcccctctctgtgactgtcacggcctgtgtgtgtgtgtgtcggcgggggggggtcaaggatgcccccccgtcaaggaaggcaggatcccttctcacgccctaagccctccaccctgaggggatctctgcccccaccacctcctacccaggcccaccagtgcccaccccgcactcaccgcccacggcagcccctccgtcgatttccacgggacacctgccccagcgggcctggcgctgcgtctgctgtggcctggccctgccggagccgagccaggtcggggctgcgtgggggaggattagctcaaggtgattaattgaggcggcccctcccacttggtcctgggctgttctgagccaggagggagggcagggtggatggagggctggggctctaagtgggtggctggggggatagtcttacaggctccacggccccttgccataagacggcaagggcctctccctctctgggcctcagtttccctggctgtaaaactgccacactaggacctaccctggggggatttcagcttctcagagcatcgcacagaaattggcatacagggggcacttaatgaatgctcactgttaatatttttatctgctgggggcagaaaaaggtgtcttagaactcacagatgtcagaggcagttggggaagctgaggtccagaggtgaaggcactgcagttggttcctctggacacaaggggtagggacccttttagctgggtctggaggtatgaatagacgttcaccattcacagccgggcgcagtggctcacgcctgtaaccccagcactttgggaggctgaggcgggcggatcacctgagatcatgagtttgagaccagcctggccaacatggcaaaaccctgtctactaaaaatacaaaaattagccaggcgtggtggtgggtgcctataactcccagctactcgggaggctgaggcaggagaattgcttgaacctggtggggtggagcttgcagtgagccaaggtcatgccattgcactccagcctgggcaacagagtgaaactccatctcaaaaaaaaaaaaaaacaaaaaaccaaaaccaccaccaacaaaaaagaaaaacagaagttcaccattcaataaacatttattgagcacttactgtgtaccaggtactgctcacagcagtagtgaccaaaacagacagaagtcacggggctgactttctagcagggcagacagacaaccaaccactgtgttaaaatgcagagcgtggccagtggccacgagcctagggagaaaacccacggaggggggcctgtgggggcaaggtgggttgatatttcatttagtttttgggtttttttttgagacagagtcctactctgtcgcccaggctggagtgcagtggcacgatctcagctcactgcaacctccgcctcctgggttcaagcaattctcctgcctcagcctcctgagtagctgggattacagacacctgcaaccacgcctggctaatttttgtattttttagtagagacacggtttcgccaccttggccaggctggtcttgaactcctgacctcgtgatccgcctgccttggcctcccaaagtgctggcattacaggtgtgagctaccccgcctggcctatttttgtttttttgagaaggagtctcactctgttgcctaggctggagtgcagtggtgagatctcggctcactgcaacctccgcctcccaggttcaagtgattctcctgcctcagcctcctgagtagctcggattacaggtgcgccaccacgcccagctaatttttgtatttttactgaagatggggtttcaccgtgttggccaggttgctcttgaactcctgacctcaggtgatccacttgcctcggcctcccatagtgcaggagttccaggcgtgagccaccgcgaccagtcgggttgctatgttaaggaaggtggtgagaatggaagatggagtgcaaagccgcaagttctggacacatggggtgtgaaggatggagtgctggggaaccatgggaggttgtggagcagggacacagtggcattttatacaaacatcaatgatgagcagctgagaaaccaggggcaggtgccaggcaggtgaggctacagggtctagtcaggccaagggccgggggagatggggaggacagaagggtgggggtagcaattccagaggaaggaagctggagaggggcagggtgtgggtatggaggtgcaagggcgttgcccaggcccattctgggctgtgaggtgggactgtttcagaggcagaggcctgagaggtggagcgggctccaggggaagccccagagacgagtgccccccaagtccaaggagccagggggctcaggcaggggagtgccctagagatggaaaggagagggtactccagggacaatgggaaggggagaggaggggaggcctgatttagtgacatggaggacaggggggaggtgactgcggtggagtgagggggagacccaggcctgtggatgggcgaaggggccagtgcaaagtgaactagagatccttccagaatgttggcatgttggctttgaagggagagacacacaaagaaagagagacagagacagagacagagaaaggcgtgacacacacacacacgagaaaccaggtgcccaggccccagagtagtcccggtcggatcccagggggcaggtggcttcggcccaggatctgggtgtagctcccccatcccaggggccaagttcaggtgggcaaggtgcagaggcaaacaggggttcaatccctggccagaggggtggctgcagcttctgaggctccaggtgcctcccctggcctcagctgcccgtcggcaaggtgggcccaccaggctctgtgtccaaggtggagccaggcctgtcacccatcgagggacagggctgtgggctggggagagagaactcccctgatcgcttcatcactttagagcactaacgagctgcttcaggtctcaggccgcaattagctaattggccagtgtgggttaagaggccccaggaaggatcgtggcgtgaggcgcggcggggggggctttgggcgacttagccggacaggcagaagctgcagacgctgtgtcagcttagagggccggattaggagcgcgggctgggtgggcagggccaaggggacaggtggccccctgcagtggattaggcagaggccaggccactccgggcctttccagcctccacctttcaattttccccaagaaagaaccactaacctgcctcaggtgctggtggggagagtgaggcccgagggtgtgcagggctttaagggggccacacaggaggtcggcgtgaccttgggacatttccgtgtctcagctcaggctctgcttggccaggatgggagggtgggctgggagtcctggggtgggggccatacccagcctggccagagacccctctccgtgtatcctaaaggctggctccatgggactcagctgagagcaggtgttggaccgtcccagcaataatggagcaccagctgtatgcctgccttctaggtgcccctcccttcactgctcacacccctctgggaaaaggtgtccattggctggaggaggctgctgaggcccagagagggtaaaagctttcccagtagggaccacctctcccctgtttgcccaggactttccctgttttagcactgaagtctgacaccctggaacagccctcagccctgagcaaaccagggtggtcacaccagggtggtcaccccagggccagcgtcacacagctggggggcgagtcaggattgaacctgtgtgtgcaaagtggatccccggcccgctgtgccagagaggacaggagggccagtgtttccctgccattctgccccccagagtcaatgggtcagcctgctaggtccctggacatttggactgcctctgtccaaggacagtgtcacctgagagctgtcactgcagaagctgtggtgatactcagtgcccagagggccagcacacagtcagcctgagacagaggccgggacgcccatgctgcacaactcccgggccagcttctcagccaacttgcagaagggtgcccagcgggcgggctctacctcccagcagctgctcatgaggacatgcatggggcctggacagcccttgggggctccatgtggtaccccttctccacagcctctgacacctccttcagcctggctttgttaagaggagaggtggatggatgtgtgaatggatggtgggtgggtaggtggatggagggatggatgaatgggtgggtagatcaatggaacagtggatggagggatggatgaatagagtggatgggtgggtgaatgaatggatgggtacatggatggacatgggaatgggtgggggatggatgggtggggagatggatagataagtggatgggttggtggatggatgcatgcatggatgggtggggacagggggatgggtgggtgggtggatggatggaaggatggatggatggatggatgaaaggatggatgggtatgtggatggatgatgggtagataaatgggtggacagatgtgtgagtggatggtaggtggatggatggatgggtggacaggtggatggatgcatgggtggacggatggatggatggatggatgattgggtggatggatggatgagtggatggtgggtaggtggatgagtggatggtgggtggatggataggtgggtgggtggatggatgagtggatagtgggtagatggatggatgagtggatagtgagtgggtggatggatgagtggatagtgggtgggtggatggatggatggatgggtggatggatgagtggatggtgattgggtgggtgaatggatgggtggatggtgattgggtgggtggatagatgggtggatggtgattgggtgggtggatagatgggtggatggtgattgggtgggtggatggatggatgggtggatggtgattgggtgggtgtggatggatgggtggatgatgggtgagattttcatgattggttcaggccatcatgaaagaagcagaagtgagagacatgcagaagtgggagaggcaggagcaggaagagaggggaacgaagcctgggctgtggacccagacaggcccagattcaaatccaggctctaccatattttcttggggcaacccagtgtgagcaacctgccctctctgggcttcagcgtccacgtctgtgaaatgggtgtaatcctggcactcacctccagtggcattttgggggtctgacctgaaagcactcaacatggggcctggccatgaatgggggaggcaggaggaggagggtggcctccccaggccatccctaaatggggctgctgccacacatgcagaccctcctggggctcccatcatgggggctcccatagggatatggatggctggggcctgagaaagggctgtggtgggaggggagacttggaccttgagggctgttggcagcctcccaagatcctttaagcctgggaccccatgggttgggaaagggtgcccaccactgaataccacatgccctgggggactgcagtggggaacccgtgggtaatggcaagtgggtcccctgcccagaatcccccagggaacggtgtccccacagtggccagcaggcaggtgccagctgggcagatcctccatgggccaagatggggaggcccccgtgtgcaggcatgtggccacaggaggcaggggcttggggccggtgggtgcccaagactcggccaaggatcagtggggtcccaattaattgatcccatcatgtgggctgcagtgggttccacagagtaggaaggtgaccactggggctggggcacacagggcatctagggggggtggacctctaagggaggacccaggatgcctggcgcctgggggtgtccgagagcagatcaccaaaggtggcccccggggaagagggcacggggacacagagacacacaggcgcctagagtccttagaatccgtctttatcgggcgatcatccttcgcaggtctggggtgtccacgggccgcccagagccccctacgtgggccagcccctgctgtgggcaccaggaggatgacttgcccgcctggaccctccttgggcctggtcagtgcccccacgccgcactctccactctctcggtcctctggggccaagggccccaccgggtggggtcagggctcctggcttcggggcgaggtggagccgtcggcgtcctgccctgagacggaggctggggcacctgcactgcgtagctcccgggccagcttctcggccagtttgcggaagggtggccggcgggcgggctctgcctcccagcagctgctcatgaggacgtgcacggggcctggacagccctcggggggttccatgcggtaccccttctccacggcctccgacacctctttcagtgactgcggacagcaggcgtgggcaggggtcagggccacagcctctggacctgcccggaacccagtgcctccctgggacccccgctcaccattttagggtacggagcccgtccatatgagaagacctcccagagcagcaccccaaaactccagacatccgacttgctggtgaacttctgtggggcccgagacgggggtgaggagggacccctcaggttttctgctccagcccctgcttcctccaggaagccctcctgggttgaccctcactctctggtcttctcctaattgagtcctcccccaacgccgcccgcagttgagtctagctcagccttagtgcatgaaggaagcctggttattcttcccttcagtcctgagcccacgcctttttcagagctggagaaactgaggcccagaggggggctacgaggaacaattatgggccaagagcttcctggggaggcatagccattgcccttggagtttcagagaggccaagggacatacccagggtcatacagcagagctggggggaccccaaagccccaggggtatgtgaaggcagggctcaccccgtgtttgagagcctcgggcgccgtccacttgacgggcagccggcttgagtctagccccttccgctcggctttggccaggccaaagtcgctgaccttggccaccaggtcctctgagaccaggatgttgcgggcggccaggtcgcggtgcacaagcttcttgctctccaggtactccatgccctcggccacgtgcctgggggtagtagggggcagtgggggctcaggtgccaggatgcccacattcagggctcagaaagctcggggtgcctggggccacaagctcacaaagcctccctgccccgtgcctcagtttccccttgatggatcttggaatctgcgccccgacgaccccagtgccgcagcaccctgagagtcccacttacagagaaaactgcaggagctgagcggtgttcacgagggctcgaccccgggtccgcagaaagttcaccaggttgccctgttgggggtgggagatggccgcgggatgttggggctgctccgctgcgtgggccccctccccgcctgggccccgccccaccttgctcacgtgctccatgacaatgtacagcccctggtgcaggatcacgcccaggagacgcaccaggttctcgtgttgcatcttcctgggggcggtggggtgggcgtgagggcagggctgggaccccccccgtcccacggtccccagccccaccctgggactcacgtcatgacggccgtctcgtccaggaaggcctgggctgtcacatcacacttgatattcttcacggccaccttttgccccaggtactcaccctgcaggacagctggggggtgggggtggggaacggggtgagatcaggacccccaacaaacagggacagagagacagacggacaggcccgctcacaccggtgcccatgtaacattcacacagctgcgggtccccagaccttgaaacacagaccccatgctcctcacccctgccgcccttgcaagctccagacccaagatcagagaaccatctggctctggcgcggtggctcacgcctgtaatcccagcactttgggaggctgaggcaggcggatcacctgaggtcaggagttcaagaccagcccgactaacatggagaaaccctgtctctaatgaaaatacaaaactagccaggtgtggtggcacatgcctgtaatcccagctactcgggaggctgaggcaggagaatcacttgaacccgggaggcagaggttgcagtgagccaagattgtgccattgcactccagcctgggtgacagagcgaaactccatctcaaaaaaaaccccacaaaaaacaaaaacaaagagagaaccatctaagccaggggtctgtgaacccccaccccctcggggccaaatctacctatcacctctttttgcaagacccttcagctcaaaatgttttttgcatttttatttttaattaattaattatttatttgagacggagtcttgctctgtcgcccaggctggagtgcagtggcgccatctctgctcactgcaagctctgcctcccaggtcacgccattctcctgcctcagcctcccaagtagctgggactacaggcgcccaccaccacgcccggctaattttttttttttttttttttagtagagatggggtttcaccatgttagccaggatggtctcgatctcatgacctcgtgatccgcccgcctcagcctcccaaagtgctgggattacaggcatgagccactgtgcccggccaacatttttatttttaaaatattgatacagggtctcactctctcacccaggtagagtgcagtggcgtgatcacagctcactgcaggttcaaattcctgggttcaagggatcctcccatcccggcctcctgagtagctgggactacaggcatgctccactgtgcctggctttttttttgtacagatgggggtctcgctacgttgtccaggctgcacctgaactcctgagctcaagggatcctcctgccccgacctaccaaagtgctgggattccaggcatgagccaccgtgcctggctggtttttgcatgtttaaatggttgtaaaaacaaatcaaaagatgagtgctgtttcaggacatgtgagcattacacaaaattcaaatttctgggtcatagttttcatggccacgcccatatgtttacatattgtctgtggtcgctttcactccacaagggcaggattcagtagtggtgacagcagctacctggcccacaaagcaggaaatatttacaatctggccttttacagagagtctgccgacccctgatctaaaccccagagccttccagaataataatttcagggaatggtgtttcaaacattccaaacagtgggactgaccatacaagaccctggcagtgtgaagaagtcactaacgttgactgagcgcctgcttgagttcacttactcctcatgacagctgccattaccccctgttccagagggggaaactgaggctcagaggatttgcacgtcttcagctgcacaactagtaggtggttaagtatgggtttgaattcagctctgtgactccaaagcctcaatacgcacctcccatcttccttcagcacccccaacccagtccgccactcacctccaaactctccctctccgatctgtgctcccaatgtcaaatgctgcaggttcagtaaccagcccgctgtggagtgaagacccagtcagaggggtaatgggccccctaaatcctcccattgggggttctacttggtgagagactaggtgatgtctctcacagtgctgcagctgtggatacacatttgagtggctgctgggcctggcaatgcccctaggacatatcagagacaccccactcctggtaccaattattgttgttgcaagcaacagaactatctcaggttgacctgaacaaaaaggggcttacaggagggatagtggtgtgaatagtcaaagctgggggcctgcctggctgagaccctcagaccccacacttgccctccaggaactcccagtcaggcccaaggggtagtgccaggaaacacttcagttctcagagataagagctgcccttttctctttggctctcttgtccctccaaataccctctgggctcttccctacacagttctttacctctgaccaccccagaaacacacacagagcaaaaaaacacaacatggagacccataaaggttccagaatattccagggctctagcctccctgacccttctcccaagcactcctgtgttgtcccctccactgccctctggtcggttctgcagacgttctcttctccctccagaaagtgccccctccaaatgccacggtcttaagagatcattggccagggtgatgctagtctccacctggatgccatccctgatgggtacagacttccccagcagagagatactttcaaggagacagacatggggtcagaggaggcatttgcttttgaccttaaatattgaggatttcactacttaggggctggaaaagcatttcaggtgaagggaacagaatatacaatggctcagaggcatgaagaaaacgatgatcacagttgacctgggagggggtggatgtgtggaggaagggctttgcagatgaggctggaaaggtggctcaggccatgcaggcaggttctggaaggtggtggagctgctgggcctctctccctggaggcatggtttcatgatagaaagataaccttgaggctgcactcaaggcctgggctggaagggggactcgccctctgggaaggaggcggtctgatgggagggcctgaggctgggctgtggggaggggaggggagaagattcaccaggtcttgggaacctggccaaggagggaatgctggaggatggggtgggtggaggttcggggccaggtttctggctcagatggtggatgatggtgacagatgagtggcgaagctggggacctattgaataaaggactgatctgtgtctgtgggcacccccgaggcagcccaggtcttctatcccatagctgggcatggagacaggcttgggtgatctggcctcagaggtgcggggccccagggcccttcctcccggactgggctaacgtgggtagggaagggggtctgccctcctgggcgtcccctacccctggccagctcctcctcggccgacttggtcccgtgtttccgctttggtctcaccagcttggtgcagatagcgcccttgtccttgctgtaatgctgcaggatggtgggacagccatgagcccagccccagggaggggaaccccagcatcctgttccgttcccgggtggcctctgggtggggtgggtgggaccggggaggaggagaaaggctggtttccataggaacgggaaaggaggcaagccaaaaggagggggagtcctctggattggtatcaacttggggggtcctggggggtccccagaggagtcactctagtccctggaggtagaaccaggctgactcaggccacctgtagattgggcagtccatagggatcagcccccctatttctgcattaaggggaatcctactgtgggggtcctcctgtctgcccatctgagatgggatgggggcctgggggtgcctggggggccctggggaatacccccttcatctccacattggggaagcacagagctcagggggtcccgggtgatcagcacaggaggtagggatggtgtctgcccagctgctggggaagggatggaggtcaggtgacccgcccctctatctctacgtaggggagtctccggagtccctgggctgccccactgcagggacggggtggggcctctgggtggcagcacctccaccatgtccatgaggttgcagaagaacacggcctcatcgattgtgaggtggccgtcgcggtgcagcacgcggtagtggatgacgtcgcggccaaagctcacgcacaggacgtagtcgccggggtggcgcgcggactcccgcaccaggaacagcccatcctcgggaggctgcagctgctggacagcctcctggcccgagatcttcccgtggaaccacctgcggccacggaaggggtgggtcagactgggctgtggagggggggtcacttgctgtcccctaccccaggcccctgtcctgcccactcacggcatgaggctgagcttggggtctgcggagagggcctcccgctcccgcagcgccccagctgccagcagcccctcctgtccactggtgtggtgcttgacgcggtaccagctcttgttctgccagggaggaagcacggggttagtgtggggggtgtgggggtggtcctggtggagcccccagccccaagcacccacacccgccggccacctctcacctcgcaggcctccaggatggtgaccacgtcgcccttgcggaaggccagctcccctggcttggggcgggtgtgctcgcatttggtgatacactgggtgcccggggcccagcgcctctgcagagggggccgggagaggggcaaagggaggacatcacggagatgtggggagcagaggcacgggaggggaaagaggacaggagggagaaaggtatagagattggaaaagagcggagaggcagagaaaacagacgcagacatcgggggaaagaaagggggagtggggtgctcagagagaaatcgtagagtcacaaagagaggcggcctgggacagaaggtcaggaagccaagatgactgagaaaggccaggccgaggccagcagaagggggtagggggcagagagtacagcccttcaggaaggggtctcagggtgtggacggagttgaagaaggacccggggagcagaggaagcaggctagacacactcaccgttggcatcctggctgagacgggaggggggtgccaggctcggaggaagcgggggctcacctggggaggggacagagtccaggtgggagctgggctgggacccacggtccagttcctaccacttccagcccaggtcaggtgggggcgatggctgggcaggcagagagagcctccccagaggcatcctggatgggacccagaactggctccccaagcccctgtggggaagtgatctttacccggggaagttcctcagcagaatcacagccgtgaaatgcccgccaggaaaccagagagcctcgccccgccatcgcccccagagggaaactgaggcaggtgagaggcacactgagcaagtggtcacagtcggggacgctgggaatggcctgccacaggccagtcggctggcacaggaggtagggagctgggtgccactggaccgagcctggttcttcctgttttctggttggtaggcaggggcagggtggggaaatagggatgagtcaaggtcattcccaagaatctctgaccgtggggtggagctgggggcaggggcgggtcctgtagccctgctgggctcctccggccacccgctgagcctctctgatccccccccaaacccaggacagacacacaaagtcactcattgctgcaggggtgggggagcctccctgcctcccccatctccccgaccgctagtggctgggaagtgggcggtgctggggggtgagtctcggcccctccaagatgcgcctcccatgaaatcctccagtcccacgtgtactcacacgcatacggatgcatgcacacgcacagaaacacacagggctcggacacagctgcgcgcagacaagcaaaggaccacgtccacgtggaaacaggtgtgcgcacacgtccccgcgcatccgcgcgcacaagcgctccacacctgggaacgtgcgcacctgtcccccgcccccggcacacacacagccgccccacactggaacacctgggcgccagcgccgggccactcgggcacgcagggcgctacgcagggccgcgcacacgcttttcggccacacgcgcacagccctccacgtggacgcgcgggtacacacgcccggggctcgtagccgcgcacacccgcacccaggaaaccccagccaccaccacgcggggtccgatcgcctctgagcaccctccgccccagccgcgcacccgctgcgcgcccgggacgcgcacactcgcgcacacaccggcccttcctgcgcacgtcccgggcccacccccgcctagagccctcggggtttccccccaccccggcctcggggtctctccacgtctccccgccgacgtgctcacctgctcagggggcgcccccgagccgcgccccgcgcccgcccccaggagggcctccgcgagccggctgcacaccccgaggcggtcccggctgcacaacttggagcgagttgctccgtttcctcattttgggggcgaagaagggtcggggagtgggggaaagcgggaggcgccgcggcctgggaggcccccgcgggtcctagcgccggccgcactgcggtctcctccgcgcgccgccgccgccgccggcccctccccgccccgcctccgcggcccccggcgcctcccgcgcgccccgggcggggtcccggggcgcacgcgggctccacgcctggccctgacctggccctgtcgggcgtgcaccccccacccaccctgggaagcggggttcttggagcgtggaacgggcgccgccagtgcgcgcggcggggaccgggggtgagggagagtgagctgcccgtccggggagataagcaaggcgccaagcccggactcccagaggacacttcgtactctgcaattccaactccctcagtgtcgcccatttgagcacccaccgtctcagagggctattggtggttgacaaaaaaaaagctttcaaaatgtcagccgctatcaatatcattatcataatcatcaacattaagggaaaattggagtaacagaatcatcgggaactgtaatcatccggatgcaaacttcttagagctgccctccttggagggtaaaaggggggcctgggagttggagggacctggctctgcccgtaggtaggaggtaccccttttccagccgggatttcctcccccatatggagggtgggggccccacccgctttcacctcacagaacagtttgatctcacttggtcttggtggacagggccctggcccccagcgatggctttgtggttggggtgaccaaaacgcccaatctgctttcacccaatgcaggcctttatctttatttttattcatttattttttgagacagggtctcactctatcccctgggctggagtgcagtggcgtgatcatagctcactacagccttgaccacctgggctcaagccagcctcccgcctcagcctcccgtgtagctgggaccacagggtaattttttttttcccaaattttcatagagccatagaaggggtagcctcaggagggggtgagttccctgtcctgggaggaatccaagaattggccactttgcctttttttttttttgagatggagtcttgctctgttacccgggctggagtgcagtggcgctatcttggctcactgcaacctccacctcccgggttcaagcaattctccttcctcaccctcctgagtagctgggattacaggtgcgtgccaccacgccctgctaacttttgtatttttatttttatttttttgagatgaagtctcactttgttgcccaggctggtcttggactcctgggatcaagcgatcctcccatttcggcctcccaaagtgctgggattacaggcgtgagccaccacgccttgcaccttatcatcctttctaagggatgagtcctctgaaacaaagatgaagttcatcttaggagggcaatgaaccgagatgcccaggtggcctgcgcccatatttaatcttctgttaccccaaaaggctgtgtgtctggacttgggggcatcacatgattttgcggggagcagaggcccagttacaagagaattacagaacagctatattaaggaacattatgcagcagactaggaaactatattattattattatcattattagagctgggggtctctctgtgttgcccaggctggcctcaaatgcctgggctcaagcgaacctcctgcctcagcctcctgagtagctgggactacacgtgcacaccatggtgcctggttaaaccatactattatatatattatattattaatatttatattatattatattatattatattatattatattatattatattatatacctggggcatccaggatgctctctcatctcaatagcatcaacttaatcccatctgtaggctgggcccagtggctcacgcctgtaatcccagcactttgggaggccaaggcgggcagatcacctgaggtcaggagttctagaccagcctagccaacgtggtgataccccgtctctactaaaactacaaaaattagctgggcgtggtggcacatgcctgtaatcccagcactttgggaggccgaggcgggtggatcacgaggtcaggagttcgagaccagcctggccaagatggtgaaaccctgtctactaaaaatacaaaaattagtctggtgtggtggtggatgcctgtaatcccagctactcgggaggccaaggtagagaattgcttgaacctgggaggcggaggttgcagagagccaagatcgcgccactgcaccccagcctgggcaacagagtgagactctgtctccaaaaaaaaaaaaaaaaaaaaaaatagagatgggatctggctatgttgcccaggctggtctcaaatttctgcactcaaacgatcctccaaccttggcctcccaaagtgctgggattccagatatgagccactgcactatctcagctcactgcaacctctgcctcctggattcaagcaattctcctgtttcagcctcctgagtagctgggattacaggcacatgccaccacacccagctaatttttgtacttttagtagaaacagggtttcaccatattggtcagctggtttcaaactcctgacctcaggtgatctaccaatgttggcctcccaaagtgctgggattataggcgtgagccacggcgcatggtttaccggcctcaactttctttcatggggttgtaatttactattagaagatcttctgggaggatgcccgtgtctacaattttagcacccacagcttcgtggatctggctgtgggatagtctggggtgtggctccccagaaagggctggggacgctgcagctgtccttctgtcacagtcactgcgggcccaccatatatggcaaaccaccatcacttgcctgaactagaagtgttaagtcaaaatatctgcagcggaaaacccagccgcctaatttgattctcaccagaagctgctgctgaccacgggtccctcgccgaggtctgccttctcttcgttcagcagggaaatgtccctgcatgagagggacatttaagatgctctagcaccccatgaagactttctcctcttcctctctctgcaaatcaatgatattagtgtcagtcctcccgaggagccccagggctccgggcaggaggcctcaccccagaagaaataataaggggaaccaaggtcttgagcccagagaagggcggacttaaggagctggtgttgggttcgcaaattgtcaagggctggctggggcagggagctcccctgactgggtggagacatagacactgagctgtgcctgactctagggggatagatttgagcctgcggtttatttgaatcagagccacagaaggggtagcctcaggagggggtgaggcatccaagaattggcaactttgctttttttttttttttttttttgagatggagtcttgctctgttacccgggctagagtgcagtggcctgatctcggctcactgcaacctccatctcccaggttcaagcgattctccttcctcagcctcctgagtagctgggattacaggtgcgtgccaccacgccctgctaacttttgtatttgtatttgtatttttttgagatagggtctcactcctgtcacgcaggctggagtgcagtggcgcgatctcagctcactgcaacctccatctcccgggttcaagtgattcgccttcctcagcctcctgagtagctgggattacaggtgcccgccaccatgcccagctaatttttgtatttttagtagagacagggtttcgccatgttggccaggctggcctggaactcctgacctcctgaccaagaattagccactttgaatcacaaagactctagggctctttcaggccccagaggtggccgcaccagtttctaatgcttcctgccaaggagctgggggactcaccccttccttataccagcctgagtgggtagactggacacccagattcccccagtcctgaactccccaccctccacctctcatccttggtgaccccctgtcaacttgatttcagaagttctctgatctgcaggtcaccctcctggtgcaggctggtgacagagcagtcccctttctggcgtcctggctgcctccaggttttcacctttcactgcaaagccaagggaaagaaacgtgactgtgtcctccctcactctaaatccttccatagctccccactgcctgcaggagagagcctaaaatgctcagcctggcatccagggctcttcatgtttggcctccagctgatctcccaggtcccattttctcctcctccctccaagaacctaatattctagtgagtccgaactgcagaagtttccacgcctttgcactggctgttccctctcccctggaatgcccttccccgccgtgtccagctggcctctccaagctcactctcccacacacaactcatgtggcaccatttggggaaagccttcctcaaggacatccccatacttcctagagcaaggtctccctgaaagggccccttgctagaggcactagctctcttgtctcactgtgtgataggtgtgagcctggccgtctctccttggtcttggtgactgagcccattagcctgcctgagaaggaggccagcctggaggaaacagagccaagaagcagggagagacactgaatcccaagggaaagactggttccgtatccttagaaccagcgatgcctggaattcacgtgacacctagttttagcagccagtctttcttttttgatttcttcccgagggggttctgctgcttacaatcaaagggattcttaatactcaaaatagtaccagaagtggggagttaaaattaacagactaatgtggaattgctgagtcaaattagattccctgatcccagctgggaagagggatgcctcgagcttctctttccgagagtccataaacctgccttccattccctgagtcaggcggcaccaggcttctgtcctttgcaatgcagcagcccagtggacacagtcatctctccacctccccccacttttttttttttgaaacagagtattgctctgttccaagacgagtccagtggcacgatttcggctcactgcaaactctgcctcccgggtttaagtgattctcctgcctcagcctcccaagtagctgggattacaggtgcccaccaccatgcctggctaatttttgtatttttagtagagacggggtttcaccatgttggccaggctggtctcgaactcctgacctcaggcgatctgcccgcctcggcatcccaaagtattgggattacaggcgtgagccaccgcacccagcctccacctcctccccttcttgagtgtttttctatttctttcctatccaaatctcacagttcttcacatatcactctcctcccatagacccccctctggctgtcataatctgcctaacccactactctccaaattcctagagatcactgagaccagtcttctcatttgagaagtagaacagctgaggccaggcacggtggctcacacctgtaatcccagcactttgggaggccgaggtgggtggttcacctgaggtcaggagttcaagaccagcctggccaacatggcaaaaccccgtctctactaaaaatacaaaaattagctgggcgtggcggcgggtgcctataatcccaagtactcaggaggctgaggtaggagaatcgcttgaatccaggaggctgaggttgcagtgagccaagatcgcaccactatagaccagtctggcaacagagtgagactccatcttaaaaaaaaaaaaaaaagtgtaaagtggaacagctgagacccagagaggcaagactactcatccttgatcacacagctggctgggggctaaacctcaggcctgtagactcccctgattggattgcaaacttctctaaggcagggcacgattcttattcttctctacaaatactgttggaaatcatagtaggcaataaacatagtaggtgatgagtcatatgacagatactttacaaaatttatcagtcagggttgggattggctggctgggatggagaacttcaaacgctagaggcttgaaattgatagaaaggcatcgtgactgaggcaggcaatgctgggcagtgttagggactgggctcctgcctcttgttcagcctttttcagcacatgaatttccaactctttttttttttttttttttttgagatggagtctcgctctgtcacccaggctggagtgcagtggtgcgatctcagctcactgcaacctctgcctcctgggttcaagcgattctcctgcctcagcctcccgagtaggtggtattacaggtacctgccagccaccatgcccggctaatttttgtatttttagtagagatggggtttcaccatgttggccaggctggtcttgaactcctgacctcaggtgatccacccacctcggcctcccaaagtgctgggattacaggcgtgagccaccgtttccagcctcacaattgaactttctgaacctggaggacaggccggggtggggaggccactgcagccagacatggggacacctgagccgccatggcctccatggaagccgtccccggcctagccgtcctcggctggaatctgcagttagatcacactgccccagttagcaaacctttaaatttagcttcctccccccagccaggggactccgggattgaggggaggaacgctggctctttcgaggaagaacgctgcatcactcattctgcaaccagtcgctgtctgcccggccattctcgattccttgaacgaagggcctcttggggcgagctgctttgggcgtctttgctggaaaacccttgccccgtcttcctcgtccttaagacgcagccggacaggttgttttccagccacacttgcaggtttcatccgtggaaactgggtctgtgtcacatccggccttaaaagcttcccggctgggcgtggtggctcacgcctgtaatcccagctctttgggaggccgaggctggtggatcatctgaggtcaggagttcgagaccagtctgaccaacatggtgaaatcccgtctctactaaaaaaatacaaaaattaggccaggtgcggtggctcatgcctataatcccagcactttgggaggctgaggagggtggatcacgaggtcaggagatcgagatcattctggctaacatggtgaaaccccgtctctactaaaaatataaaaattagccaggtgtggtggcgggtgcctgtagtcccagctactcgggaggctgaggcaggagaatggcgtgaacccgggaggcagagcttgcactgagcggagatcacgccactgcactccagcctgggcgacagagtggagactccatctcaagaaaaaaaaaaaaaattagctgggcgtggtggcatgtgcctataatcccagctactcgggaagctgaggcaggagaatcacttaaacctgggaggtggaggttgcaatgagctgagatcaggccactgcattccagcctgggtgatagagtgagactgtcaaaataaataaataaaaaataaataaaataaaagcttcccatggttcccactaagctcagtgtgcctcccggtgctttgtcacctctgcggtccagtggctgtcacctctctgctcccagcttctcccttgtctcccaaaagctcaggcatggggcagccacaggacctttgcacatgctcttcctatctcctagtactacatccttcccccagctcttctcaaggccagctacttctctgcactttcagcttctccaagagaccctccctggccaccccacagtggtcacccttagttactctctattgtcaaagccggaatccccacctgttatcctgtctcactcgtcattgtcaatctccctccatccttgcttcccacgacagaatatatcttcctaatgagggtaacgaccagccctgggcccggcaaccatttaggtctggagcctggcacataaaaggcccttacagaagcagatgagagggtaaagtctgaggaaggaggccaggcatgaaggctcacgcttgcaatcccagcactttgggaggctgaggtgggaggattgcttgagccctgccattggagaccagtctggccaacatagtgagaccctgtctctacaaaaaataaaataaactagctgggtgtggtggtgtatgcctgtagtcccagccactcaggaagctgaggcaggaggatcacttgagcccaggaggttgaggctgcagtcagctatgattatgctactgcactccagcctgggcaacagagcaagaccctgtctcaaaaaaagaaaagaaaagatcaagtaaggagaacaggagatacacattattccggaataaaccagtcatgtctactcaagagcagcccctaagtctctcctccaggatccctcttcatcctctcatgacctcatgctctaactcagggcccagcaaactgtctctctaaagggcatgctggtctctgtcccaactactcagctctgccatttcagggacaccatagataacacagaagccaaagaccgtggctgcattccaataaaactttatttatggacatggacatttgactttcatattacttttcttttcttttgcttttttttttttttttttttgagctggagtctcgctctgttgcccaggctggagtgcagtggcgtgatcttggctcactgcacgctccacctcccaggttcacaccattgtcctgcctcagtctcccatgtagctgggactacaggcgcccgccaccacacccgcctaattttttgcatttttagtagagaagggatttcatcgtgttagccaggatggtctcgatctcctgacctcgtgatccgcccacctcggcctcccaaagtgctaggattatgggcgtgagccaccaagcctggccttttttttttttttgagacagagtctcactctgttacccaggctggaatgcattaacgtgatctcggctcactgcaacttctgcctcctgggttcaagcaattctcatgtctcaacctcccaagtagctgggattacaggcatgtgccaccacacccggctaatttttgtattttagtagagatgggtttcatgttggccaggctggtcttgaactcctgaccttagatgatctgcccactttggcctcccaaagtgctgggattacagatatgagccaccatgcccggcctcatatgacttttcatatgtcatataatattgattccattttcctccaactatttacaaatgtaaaaaaacgattttagctggaggagttgtgcggatacagatggcaggttggacttggccctcagactgtagtttgctctccgctgccttctcacagtctttattttctcataagtaggtgcttttttttttttttttttttttttttttgagatggaatctcactgtttcgtccaggctggagtgcagaggcgtgatcttggctcactgcatcctccgcctcccaggttcaagctattctcctgcctcagcctcttgaatagctaggattacaggcacgcgccatcacgcctggctaatttttgtatttttagtagagatgaggtttcaccatgttggccaggctggtctcgaactcctgacctcaagtgatctgcttgcctcggcctcccaaagtgctgggattacacgtgtgagccaccagctgtatttttcaatctgttaaattaaatgtgctgatactcatggcatgtaataagctctcaagaagtgtttaaaaaaataaaactcaaaatatataaataaagctcctcaactcagcaatgagcctctcaagggtaagtatattcttgttggtatgaatagcagctgatatttatagggtgttttactgtgtgctgaagacaaagcaatataatgtcccactcctcaggggttgctgttgctgttttcaggtatttacctccatagttccaagtaatgtgttttacacatcccttgatttatcagttggatgttgtccattgacttcctattccagaaggtcaagatttagctctcttaggcattctgctcccccaacagttaaatcacaatttttgcttaaatgaaaattcagtgcttatagtatatatattaatataaatattattgacagtggagcaatgtatactaagaacattattttctgggacctgcttttttatttccctggagttagtcatcgccttggttttatgtgtctgtgactctttcccccagcctctccaccagaactgacatctccactcaggactttctcctactgcccagctgtgatcctggcccctctcttcttcggcacaaggggattcttagatatagctcctgtttcttgggtgtgggtctccctgtttcttggtttggtcccttgttttaggaatgtgctccccctagggtttccagagaaagtgttttcctcctactctcctgggtaattagaggtttggctgacagtattgtaggtggatacttttcttttgcccaatgttttccagcttctagtcttgggcagctgaatgatcagaagttgtcctgtttcctcatactttgcctgtcccatggttaatttctgtctctctctctctctttctggaagcttgtagaatcttcttgttccctacatcctgcactttcacagtggtgggtttggtgtgggtctgttttcaaccattgtgctgagtacttggtgggctctttcctgtgttctcttcctggcaaactttcttgaatgatatcattggtgatttcttccactttggtttctctggcgtgtttgtggaacacgttattgtcatagggtggacttcttggattgatgttttcattttcttgcctaccttcccccccacccccccactttctactttttcttccaacccttctattgacattttaattttgactattaatttttttttttttttgagacagggtctcactctgttgctcaggctggagtgcagtggtgcaatcacagcccactgcagcctcgacctcctgggctcaagtgatcctcctgcctcagcctcccaagtagctgggactacaggtgcctgccaccatgctggctaatttttttgatttttagtctcactatgtttcccaggctggtttcaaactcctgagctcaaacaatctgcctgcctcagcctcctggagtgttgggattacaggcatgcaccaccacacccagtgactgtcagagttttaatttccaagagctctttctggttcttttaccgttcctctttaaaggacaaacttggctgtgtgtggtggctcacggagctcaggagtttgagaccagcctgggcaacatagtgagaccccaatctccaaataatatgtaaataaataaaagaatttcttggcccagtgcagtggctcacacctgtaatcccagcactttaggagtctgaggctgatgggtcaccagaggtcaggagttcgagaccaggctggccaacatggtgaaaccccatctctactaaatatacaaaaattagccgggcatggtggctcatgcctataatcccagctacttgggaggctaaaggaggagaatcgcttgaacctgggaggtgaagtttgcagtgagccaagaacacatcactgtactccagcctgggtgacagagggagactccatctcaaaaaataaaaaataaaaataaataataaataaataagtaaataaataaaggcaaacttatacttgtttcctggctgttatatcctctatgagctctccgaggataagatgcatacaggttttgtttttttctgttctgtgtttgaatcaggaacataaggatttttctagaactgttttcttctgccctctttgtctctccttcaggttacttttcttttctctttgtgggttttggtctctctgttgactaacaattatgatggagtgctacagagctgacggaagcctcctcaccacagggcggcctcactgtggggtggttggcgggtgggggtgggggtcactgggcaggaatcccgaaacattggcagcatctggaaggcttttctcatagcctggcatccagcgttctagaagccacaagaggttagacatctggggttgtgactttaatggcctggattttttattttttttatttttttgagacagagttttgctcttattgcccaggctggagtgcaatggcacagtgtcagttcactgcaatctctgcttcccaggttcaagtgattctcctgcctcagcctcccaaggctgggattacaggcatgtgccaccaagcctggctaattttttttttttttggtagagacgggatttcaccatgttggtcaggctggtcctgaactcctgacctcaggtgatgcacctgcctcagcctcccaaagtgctgggattacaggcgtgagccaccgtgcccggcctgttttttttttaaggcagggtctcactctgtcgtacaggatggagtgcagtggcgtgatcataggtcactgcagcctcaacctccagggctcaagtgatcctcctgcctcagcctctcaagtagctgggactataggcatgcatcatcatacctggctatttttttttttttttcagagatggggtcttggtatgttgcccaggctggtctcaaactcctgggctcaagtgatcctcccgccttagtctcccaaagtgctgggattacaagcatgagccactgcacttggccttaatagcccatttgcacagcccctcatccctgccctccatggcgcctgggtccctgtgcctgaacctttctgtgcagcaagcattttaaaatgcattttcttactgaattctcctcacagctctctgcacagttggggactaccagtttgaccccaattttatggaagcttaaggcggtaacatgagctgtccccacactccatagctgataagttaaagggccacgctgtgactagagcccagagtcaccctcactgcgtgaagtgacggcttctggctcatccttgggtgtcccaaggaaggcagtgagtgtttgctgattgtctatggaataaatgtcaacatcctcaatgggagaaatagggaaaccacatgaatgaaggcccagcacacatcacaggtgttcaacacacagacggaattaatgagcaactgaaagaacaggagttgaggccgggtgtggtggctcacgcctgtaatcccagcactttgggaggctgaggcaggtggatcacctggggtcaggagttcgagaccagtctgggcaacgcagtgaaaccccatctctgctaaaatacaaaaaaattagctgggtgtggtggtgggcgcctgtggtcccagctacttgggaggctgaggcaggagaatcacttgaacccaggaggcagaggttgcagtgagctgagatcacaccattgcacttgagcctgggtgacagagcgagaccttgtctcaaagaaaaataagatgtgtcagccgggcgcggtggctcacgcctgtaatcccagcactttgggaggctgaggcgggaggatcacgaggtcaagagatcgagaccatcctggctgacacggtgaaaccccgtctctactaaaaatacaaaaaattagctgggtgtggttgcaggcgcctgtagtcccagctactcgggaggctgaggcaggagaatggcgtgaacccgggaggcggagcctgcagtgagccgagattgtgccactgcgctccagcctgggcaacagagcgagactccgtctcaaaaaaaaaaaaaagaaaaaaaggaaaaaagaaaaataaaatgtgtcttgtagggtcatgagaagaattaaattagataataagcacacagtaaataggtgatgaatcaatgtcgttataataccaagtgaagaaaagcaggaagcaagatggtaaaaatgacccacccataaacaacagggcattaaagaatagagagcaggatggccgggcgtggtggctcagccctgtagtcccagcactttgggaggccaagcactttgggaggccgaggagggcgaatcatctgaggtcaggagtttgagaccagcctgaccaacgtggtgaaaccccatctctactaaaaatgcaaaaattagctgggcgtggtggcaggtgcctgtaatcccagctactcaggaggctgaggcaggagaatcgcctgaacccaggaggcggaggttgtggtgagccgagattgcgccactgcactccagcctgggcaacgggagcaaaactccgtcttcagaaaaaaaaaggaaaagaaagcagaagggaaatggagtgttcacagtagctgataattttgtggttgttttgtgattgttttgttttccttcttccatttttctggattgtccaagtttttcataatgggaaaaacccaattcatgagtaaaaacatttatgtggaaaaacacatgtaacaaaatttgccatcttaatcattttttatttttatttatttatgtatttttgagacagagtgtcgctctgtcatccacgctggagtgcagtggcgcaatctcggctcactacaaccttggtctccaggttcaagcgattctcctgcctcagcctcctgagtagctgggattacaggtgcccaccaccacgcccggctgatttttgtatttttagtacagacggggtttcgaactcctgacctcaagtaatccgcccgcctcggcctctcaaagtgttgggatgacaggcgtgagccaccgcgcccggccgatgcttcctaatgcatttcgtttgcaaaatttgggagtgaccgttttctacccagaggtggcttctccaccttaaccaggaaagcgggtcttaatccgatcacctgagacaccttctcagtcccagaagctaaactagggaggcatcccgggacaagacgggcaacaatcttttcccaaacgacccccgagcctggccagggagatgctgcctgcaaggctgactgtgactgggccgggggactcagggcatcttagcggccgcctctcgctcctgtccgtgaccttgcagatgcaggtgacagcctgcccttccgtttttgtctttccagtcccgcctgccggattgggttccagccctgcccacacgcccggtacatcccgcctacactcaccgatgtcgcctagcaacccggctcgcagctagcatccgcaaccgaggtccccgcgctccagttctctggcggggagggagaggggtgttgcttctccagccccctgcagcctggtgtcttcctgccacccgccggcctgctccgggaaccgcggcctggtgggacgagggttgcggaggacgggtcaggagcgaccgcgtttcaggcccgtggactccgcagcccagacggtccatccatctgcaccgaatcccttcgctaaccaactgcttgattttgctgtcgcgccgcctaaacttggttttttggagttgctaggagggccgacttaactctttgtcagccgggctggttttcacccacctggtggcaggaatcctgtttgccttccccgggagccagggatgggaacgggaactgtgggtgggaggcttccgagagccgcctctcccggggcataaggaaggaagcggggctgcaggtaccgcctggggttcacagcaggggacgaggtgcctcccaccaggggctgctgtgatcgccaggcctgccagggtgtgccccttcccctgtcccttccctctgtccccacagccttggctggagtccctcaccggtaacgagacagagacaaatggtgttctctgtctttctgagacagagttttgctcctgttgcccaggctggagtgcaatggcgtgatctcagttcaccacaacttctgcctcccgggttcaagcgattctcctgcctcagccttccaagtagctgggattacaggtgcccgccaccacacccaactaatttttggtatttttagtagagacagggtttcaccacgtgggccaggctggtctcgaactcctgacctcaagtgatccgctcgccttggcctcccaaagtgctgggattacaggcacatgccactgcacccggccgacaaatggtattctcataaccaccagaaagagacacgtcctctggtgtcagagcgtggctctgagcactgagaccgactcagttgctagcgtccacctggcctgcccgagatctgggaatacagtggtgatccaattgatggtgagaggcttcctgacaggcagagagttcacattctcaaggggaagacagataccaaatcgtttcaaagatgcatggtttaaagtcaaggaataggccaggcgcggtggctcacgcctataatcccagcactttgggaggctgaggtgggcggatcacctgaggtcaggagtttgagaccagcctggccaacatggtgaaaccccgtctctactaaaaatacaaaaaattagctgggcgtggtgatgtaggcctgtagtcccagctactcgggtggctgaggtggaataatcactggaactcaggaggcgaggttgcagtgagctgagatcgagctgctgcactccagcctgggagacagagaccctgtctcaaaaaaaaaaaaaaaaaaaaaaggtggaactggaattgacaagacatcctcatggattggccgggagcacagaggaatccaggaggcctccctggttgtgctggctgtcaccttgagccctgggcaaatggcggtgctgctgccgcgatgctgacggagagaggggctgtgtgtggacggagtgtgtagcaagggagtgaagttcccaagaaatctgggatagagtggaaagcaggagagagggtgtgaggtggaggaggacggtggcctagaggccgcctgccctccggggaggcttaaccagcaattcctgttgctgacagataatccctgctagaaggggacccctcggtggctccccacccccctcctttggcctgggcctgaaacagcggtccctgcacacccagcccctgccactcccgtcccgccgcccccaccctgcatctgcctcctcccccaccctgcatctgcctcctccccactctgctccccgcctgccccccgtcccaaacactgccagggaagccctgtgggctggaaactgtcacgaaactcttccactgtgaccaggtctcagcatctgaacaccctccgcccgccttctgagggtttgggaatgtggcgggggaagcactctgtgggcagaggcatctctcccaaactcagcgtagttgcctcctcctccaggaagccctcggggagcctccagagcatctcactgtgtgtctctaggatggggccaggggaaccctcaaggaccgaggcagagagctgggttatgggaggcgttgagatgaatgattctcagccggtgtgtctgtgttcccaggggacccttgtgaggggacagcctgaggatgcccacaccttggggagcagccactgagcagtgccagccccttgggcccctcccagtccacatttgggctgcagggtttctgggagacccccacccgggaccctgagaaggaggtgaagagcccagcatttggggtcacctgcaccccgcaggaaggacggcacggctcacacaaaagacaaatgatttcctttattccccctgcctcccaatttccaggtagctctacaaagacattcagacagagccacatgcaggctgtccttcaaacacagagaaacaaaactgagccactggctggagatcacatctgcccaaaggtggacttttctcattcaatgccactgggcagctggccaaagaaaaaaaaactgaccaagcggaaggtttgaacaggttggggtggggactcagaagggggtgcccccacatccatcagtgccaggaggcgcctgcccaccatggccagcatccacaagacggcggcccctccccgggtcccccaggcacgggtcccgggccctgctaccacaaggggggattggggaccccctgcctcagggccagccaaggcctacatcagggagagagggaggaaggaaggacggaagctcaaatccaggcctcagtgacacatggcagagtgggttttctctgtgaaaggcactcagtggtacagggctcggggcggggggtgggtgggggtgcctctgggctccgggtctgactgtccagcacagctgttcccgggggaggcccagccaggatcctcatcgcccgtcggcgtgtccacctggccctgtggctctccccacaggggacgagcctggctcaggccctgctgacatcctggctgtggaggtgggtggggggtctgtttggagcaggctgggctgggggcgtggggatgccggctgggagctcccctgggcttgtcctgcacatgtggtggggccccagaacagggcctgcccacgtgatttcaaatccatgccgcagccgcatccaaagaaagttttgtttgtttgtttgtttgtttgtttgtttctttgagacagggtctcgctctgtaacccaggctggagttcagtagcgcaatctcggctcgctgcagcctcgaactcctgggctcaagggatcctacggcctcagcctcccgagtagctgggactacaggcttgggccaccacaactggctaattttttgtagagatggggtgtcaccatattgcccagactgatcttaaaccgctgggctcaagcgatccaccaagcttggcctcccaaagtgctgggattataggtgtgagccaccatgcgcagcccagaggaagtattttaaaaccccttcctgtaccacgaggtgagtttagagccagcaagatgcccccgagtttagaatctgcttgctgtactgctggcccccctggctgtgggggatggggccctcgaggaaggggtgccactcccagggctggatggtgtcatttctgtaacaatttaagcacaaatgttaaaaaacatttcttttaagtgacaaagtcttcttctgttgcccaggctggagtgtcacggtgcaatcacagctcactgccctcctggcctcaaggctccggactcagcctcccaagtagctgggactacaggtgcacaccaccacgccaggctaattgttgtgttttttactagagacagggtttcaccatgttgaccaggccggtctcgaactcctgacctcaggcgatctgcccacctcggcctctcaaagtgctgggattacaggcgtgaatcaccgcgcctggccaccaaccatgccaagctgatttttaaaaatattttggagagatgggggtctcactctgttgtctgggctggccttgaactctcaggctcaagcaactcagcctcccaaagtgctgggattaaaggcatgagccacagtgcccggtctgaagcacaggtgttttaaaggaaacctacagagcgttactcaaaaggaaatgaccattgtccaacgtcggggatgaagcagccattggtcggcgcgcacacgtccaggagtgcagggatgcaaaggcccgcaggtgggggaggtaggcggctcacacgagcccctctccgccccgccggccccgcttcttctcccctgcgccctcctctccctcgccaggtccccgttgcctcttccggaagcgggcccccagccggtgtctgggcggcaggagatccatgcccaggaccttgtgggtctgccggaaggccagcattcgcagggcgtgctgcggggcacacacagcctgtcaggacccccgcccgctctgctccccgagtgctggggacacagaggggctggtgtctgtggccaccagcagatgggccaggcctatcctgtatccctcgagatagcccccggccccccgccgctttcttttttgagacacagtctcgctctgtcacccaggctggagtgcagtggcgcgatctcagctcattgcaaccaccgcctcccaggttcaagtgattctcctgcctcagcctcccaagtagctgggattacaggcgtgtgccaccacgcccagctaattttgtatttttagtagagacagggtttcaccatgttggccaggctggtctcgaactcctgaccttgtgatccgcccgcctcggcttcccaaagtgctgggatgacaggcgtgagccacccggcccggccgacaccgcttcttacgactgcggagcttgggtcactgcagggcctgaggaattttcgcgtggtgccggctgaccacaaggactgtcccaggaggcccccccgctccactgaccaccagctctttccgcctcactggagggaccccacatcctgcactgcaagccattccagtgatcccattcaaggcaaaattcagaaacgtcagacccgatgcggtttggttttggtgctgctaggagatttttcttataaacaaatttgcaaacaaggtaaccacaggtgagggctgggcaggcggagctgtcggccacggctgggcttctaggaccatggtcagtggtgtgggggaggacggtccctgccaatgagacctgaggtctgggcgtcattaacggtggtggctttggctctcagctgctggccccacgccaccatgccaggctggccctgtccctgtgcgtggtcctgccacccacgggccgccctcctgttcctgtacatctcagtgggagggagagaaggggaaacccaggccatttcggggaacactgcacagctgcaagccggagctggggcctgggtgtcacccttgccgtgacttgaccctcctacctgggcgctggcggtcacgtcttcccgctcttggagggtcatgggctcgagggcatctgtctggtctctctcgcagggatcctggagcccgggcccgtctttgtgacggggagtgggaacagcaaagaaggcgagaatgccctcgtgaaagacggtgacagggccgtccctcgacaccgtggggcctcaggggcccgtgcatggggctatacttgcagccgtggcacctctgaccctcaggcctctctcagcaggttcagggtctcacccgggcacatgggggagtcctcctggcccctcaaagcctgttgggctgccagcatctcctgggcgttgtgtgtgtgttcgtgcctgtgtgcacccatgcatatacacatacgctgacgtgtgtgtccatgcgtgcccatgtgcacgtgtgtgtccgtgtgtgcacgtgtgtgctcattggcgtatgtgcatgtgtgcctgtgtgtgcatgtgtgcccgtgtgtgcacccatgtcggtgtgtgcttgtgcatgcacccatgtgtgtccatgcatgcacggtgtgcccgtgtgtgtgtgcatgtgtgcctgtgcatgcatgtccatgtgtgtgcccatgcgtatgcatgtgcgcctgtgtgtgcaagcatgtccacgtgtgcctgtatgtgcactcattccatgtgtgtgcccgtgtgtgtgcatgcatgtgcctgtgtgtgtgcatgtgtgcccgtgtgcactcatgtatgtgtatatgcccatgtgtgcatgcatgtctgtgtgtgcatgcactcatgtctgtgtgtgcccgtgcgtgcttgtgtgcccgtgtgtgcaggtacatccatgtgtgcacctgtatgtgcactcatgtccttgtgtgcccgtgcgtgtgcgtgcatgtgtgcccgtgtgtgcaagtacatccatgtgtgcctgtatgtgtgctcatatccatatgtgtgcccgtgcgtatgtgtgcccgtgtgtgcaagtatgtccatgtgtgtgcctgtgcgtgtgcatgcacgtgcctgtgtatgtgcgtgtgtgcccgtgcgagtgcgtgcgtgtgcccgtgtgtgcaagtatgtgcgtgtgtgcgtgtgcatgcctacacgtgtgctttacatgatggcccaggcaatgggccgaaagcttcatgctcccttttcacttgctatcatcctatgtcactaaaaatgactcgaaaacacccttttccgtatctggccgccaccctctcacatgtgtgtcctggcgcgttctcttccctctgctggtgtagaacgcattgtgctgggcagctctgcgccctctgtcctctgagctcctggctgttccctctggataatctttggaggacaggcaccggggtggatttgtgccagagtggctctgtgccggggtggctctgtgccgccgccggtgggcgtggccaccagagaacataactgttgtctcctgggtgggggctgagccctcccttccgggacctgcgtgtctgtgccctgcgtgcagggtggtgtcctccatgaccgcggccctgtctgccttcctgctgggagcatgtgtgtgttgtgggccgcactcctgcctgggctggacacttcctctgtgtctgtgaccccagctctctgtgccatggccacgggccctggtctctgcgatttgccgcccacctcctgggccctccggcccagcgactgacctgtcaggagcgtccctgtggccacgcactccaggactcgcctgactgcatccccggggcccaggggcccagccgcactgctcacagccttctccaccagcagctccatggcctggtggggacagaagagcagttgctgtgttttgggcgcgcggcagcccctgcctgcccgggaggtcctggggtccctgggacaggaggcccccctcagctctttctctaactcccaccacccactgaacttccgccgaggagggctgcccgtggcagggctctgccacctcctggcacggccacaggctggtttctttcttttctgagagcggagtctcgctctattgcccaggctggagtgcagtggcacgatctcagctcactgcaacctctgcttccccggttcaagcgattctcctgcctcagcctcccatactggctggtttcttcacccctctgagcctcagtttccccggccggtccacagtgacatcacatgccagtgtcaggtgcactgtccaccacgtggggcccgcctcagctgaggggaaggagccaccctatcccaccacgtcccccctgtggccagttcccgagggcacgaggggacaggggcattgctggcctcccacagcactgtgtgggtgcctctacagtcacagcaggaaaacaggtctcagggaacacaggctttctccacgtcaggacagccgcacaccggtcacccagcacggaggctactgtgacctcctcccaggagaggagaggacgtttcccctaaacaatgagtgtgaaaggtccggcgcggtggctcatgcctgtaatcccagcactttgggaggctgaggcgggcagatcacttgaggtcaggagttcgagaccatcctggccaacatggcgaaaccccatctctactaaaaatacaaaaattagccaggcgtggtggtgcgtgcctgtaatcccagctactcgggaggctgaggcaggagaatcgcttgagcccaggaggcagaagttgcagtgagctaagatttcgccactgcactccagcctgggcaacaagagcgagactccatctcaaaaaaatgattttaaaaaaaagtaaaaaagagacttaatctctaccaaaccaaacagaacaaaacaaacaaacgcctctgtaccatgctgcattctggacactgggcagtgggtgggtgtggatgaggcacacaggcccagtgggagggaccacgggcaagacaccactccagcacgggatgggggacgccactccagcatgagatgggggacgcccgcagggcgggggggaggccgggtgtggatggctggcttgtggctggtggagaaggtgtggggactgggtgggttcccggggtctccgtggggagcgtgggcatggggcgtgctctgtgaaccttgtggtgaggggattctgtttcttctcttccctcccctttctaccaggatgggctggggggtggtgtttgagccacagggggtctcccctccagagcaggtgggtctgggctgggtcacccagaggccggtgtgcagccaggatggggagtccggcttccgcccctctgcctgggcccctctgccccggtgccacgaagtcgggcagacacctcacatttccctggccagtcccacatttgcatgtgaggttctgggttttgaatagtggcagtcaaatgaggctgtggagagggccgtctcccccgcaaggggacctcagggactcccacggcctctcctgagtactaggtctcccgccggctccttcgagggaaaaggtctgtctctcagcctgggcctgtcagggccatggaggcccttgggggtcccagtggagggccgggccgccaggcactgccttacccaggctggcagggccccccaggtgggcacacgccggcagaggtccctcaggaccctgatgacgatcacgcatggctgcaggccgctggctcgagccttcgggggagaagcacacggttagctttcaggggctcacgtggccacacggcatggcgccgggctctgtcgtgagcgtgaaccccagggaggataatagggagcctggcgggcctcgaaggtggcgggtggaaacagagtccactcccacatgagcccggtgccaccaggctgttgagtggccacgagacggcagcgtccccacccccagggcagcacccactccttccacacttcccgaccccatcagccaggagccagcgttggttgtcaagtcagcactcggccaggaagctgatggcaggcgtcccggtctgcgctgggagcccacggggctgaggcggccgcgccgggttgacctggtgcctctgagctacgttcctcaaagtcacccctctccccctgctccacccctgcccccctgacctgaaaccacctggcatgacggagggcggccagggactcgaggcacttcttggggctcaggacatcacctgcatcagcctgaggctcctccacaccttctagaagaaaaacctcgaggtgtgcggggaaggtgcctcgtcccgctctgctgccgacggggtgaggggctcagtttgggcccctcgacgcttttttttttttgagacacagtttcactgtgtcacccaggctggagtgcagtggcatgatcttggctcactgcaacctctgtctccggggttcaagtgattctcctgcctcagccttccaagtagctgggattacaggtgcccgccaccacatctggctaatttttgtatttttagtagagacggggtttccccatgttggccaggctggtcttgaactcttgacctcaggtgatcctcccacctcagcctcccaaagtgctgggattacaggcgtgagccaccgtgcccggtggggattttattttttacgtatttagagacagggtctcgctctgtggcccaggctggagtgcagtggtgtgactggagctcactgcaacctcgaactcctgggctcacgtgatcctcctgcctcagcctcctgagtagctgggactgcaggcgtgcaccaccacacccagctaatatttatttatttatttatttgtttgtttgtgttgagatggagtctcactctgttgcccaggctagaatgcagtggcgcaatcttggctcactgcaacctccgcctctcgggttcaagtgattttcctgcctcaacctcctgagtagctgggattaccggcgcacgccaccacgcccagctaatttttatatttttagtagagacagcgtttcaccgtgttggccaggctgatctcgaacccctcacctcaggtgatccgccggccttggcctcccaaagtgctaggattacaggcgtgagccaccgcgcctggccaaatttttttgttttttttataaatggggtctcactaccttgcccaggctggtctcgaatttctgggctcaagcaatcctcccacttggacctccaaaagtgctgggattagagaggtgggccgctgtgcccgacctaaaaagggagttttagaagctcacctccccaccacgctgggcctggggagaggaagcgggggcaggaaaaggccgacaggaagtgcactttcctggggggcggctcacggggctcttctgtcactgatctgtcctcacagaaggatttccgctcacttcatcacccacccgagccaggaaagagccactgtctagtggccgccaacccttaacccgcccccacaaccgcgccactccccagcctcctccgcatttgtgtcacagccttcagctagcgccaaaagccactctcttccccacactgtacttagtttttagatgactatttgtgaggactgatcgtgactttccatttaatgattcaaggctcttattaaaaaacaaaacaaaacacttaagctttaaaaaacaaattgggccaggcatggtggctcatgcctgtaatcccagcactttgggaggccgaggtgggtggatcacctgaagtcaggagttcgagaccaacctggccaacctggtaaaaccctgtctctactaaaaatacaaaaaaattaactgggtatagtggcgcacacctgtagtcccagctactcggaggctgaggcaggagaatcgcttgaacccaggcggcggaagttgcagtgagctgagattgcgccattgcactccagcctgggcaacagagcgagactctgtctcaaaaaacaaacaaacaaaaaataccaaatcgattgaaagagaaacatcagtaggtcatggccctcagttatgaccaaaaaagattacgaagggggtaaaagatgataggagtttggaaaactgccctagagactgttctggaagattccacagctggctgagacttcgggagcacagacgtgcagtgtgttactgatgcctgtcttcgctgtggccgctggccaagaccctcgctgcccctagcctggcccggcccctcacccaccctcccaggcctggcaggtctggctttaagacccccgattccctacattcctaatcagtggcactgggactgtggtgactgatggacagagtcaaactgagcttctgccgtgacccaggggaaatggctcagacctgtcctttgccgccagggctggtgtcaccagggcctgagaagcaggtgccagccctgggtaagggcaagggaggtgacacggtgtcgcttgcccgagcaaggcccctgcagccaggctctgagcccatctgatgctgtcaccgactcgccgcctctgctgcccggagacccagctcttgtgtgacccatggaatcctcagggggacagcagtgctggagcgtggctgctgtggcatttcctgctcagggcagaggcggacgctgccccaggcctgggtgtggggagcgccctggggaagcgtgagggggacagtggttggaaggaagggctgggccgcacctgggtctgtggaggggtcctcccgcatcagaggtgaggtgacagatatggtgacctgcatcctgggctcctcacaggaggagatgacaatgttggcttcagggtcggaggagacctcatactcatcctcggtcaccatctgggaggggtaaatacaacacaaggccaccttactgcagcccagattcatgtgtaaatcagccaggatgtggttggtgtgtgtaaattaatcccgtcgggcctcccacacttgctgcctgggtgccgggccctgtgccctgtgtctggaacctccaagtgaccaagacacagccgcagccctccaggagtgcacacatgtagagatatgtacagacaacagatcatgtgatgcaaggagcctccatatgtaaagaatacctgtaattcaataacaagaagaccagcaatccaataaaaaaattggtgagtgaaataacagatacctggcagaaaaagaaacacaaatggccctttttacacagtgacacacattaccccatagtcagggaggagtaaactaaaaccataatgagacgccaccatctcctgtgagcaggacatagctcaagaggtctgtgtcacagtctggtcttcctgtccatggtcatcaccctccatgaggcctgtgctcacacctgagcctggcctcccacctgaaacgcacctctctccccatcctccatcccttcccttctcagggcctccctgctgcaaggcagcccccagggggctccgttgacattactggggtggatgttgtcagcttccccacagccttatacattctcatggggctcagttattgtctttgccaccaggctgcaagttttccagaaagcaggggctgtatctatcatgttgtggccactgtcatgttgtaggtgtgcaggaaatgtgagatgcaattattgaagtcagagcatgtcactcccctgctcaaaaccctccagcctccccacttccctaagaatgcaatcctacctcctggtacggccttcaggcctggcttgatctaggtgccccctcattccctcgtgcccacccctccttgctctgggcctcctgctttttggcctctgcaggtgctggtcattctatggggaacactgtctccccgaccaggcactgcccatccactgggcatccagtgcccactggaaaagtcaaaggagtaaggctgagttttcccagggatggtgacagacgctcaggaagaaggaacgactctggggactgatttttcatttttctttctttctttttttttaagacagagtcttactctgtggcccaggctagagtgcagtggcactatctctgctcactgcaacctctgcctccagggctcaaatggttcccctccctcagcctcctgagtagctgggattacaggcgcccaccaccatgcccggctaatttttgtatttttagtacagatggggttttactatgatggccaagctggtctcgaactccggacctcaggtgatccacctgccttggcctcccaaagtgttgggattacaggcatgagccaccacgccaggcccgatttttctttttaaacctaagatgatcaatgtaaattcttcagtatgagaagagtatatgaaaattctctagaggaaaaaaattcagttgacatttcacagccctaaaattgaaattgggtttttgcttttcttacggcttcctagtcgccattgctgcgaatgttttctgtgcagctttcatcatcatttactctttttgaatttcttttgagactgagttttgctctgttgcccgggctggagtgcagtagtgaatcacagctcactgaagcctcgaactcttgggctcaagggattctcccgcttcagctccctgagtagctgggaccacaggtacatgccgccatgctcagctaattttttttttttttttttttagacggagtctcgctctgtcgcccaggctggagtgcagtggcgcgatctcggctcactgcaacctctgcctcccgggttcatgccattctcctgcctcagcctcccgagtagctgagactacaggcgcccgccaccacgcctggctaattttttttttgtatttttagtagagacggggtttcaccgtgttagccaggatggtctcgatctgctgacctcgtgatctgcccatctcagcctcccaaagtgctgggattacaggtgtgagccaccccggctggcccatgctcagctaatttttaagttttttgcagatacaggttctcactatgttgcccaggctggtctcaaactcctggactcgagtgatcctcctgcctcagcctctcaaagtgctgggatttcaggtgtgagccaccatgcctggctaacaaactggttggtttctaacagcgatgcttcttcttgtatcttttttttttttttttttttgagacccagtctcgctctgtcgcccaggctggagggcagcagtgcaatctcagctcagtgcaacctctgcctccgggatttaagtgattctcccacttcagcctcccacatagctggaattacaggcacatgtcaccaggcctggctaatttctgtatttttagtagagacggtgtttcaccatgttggccaggctggtttcaaactcctgacctcaagcgatccacctgcctcagcctccctaagtgctgggattacggacgtgagccactgcgcctggcttaatgcttcttgtaccttaaagttgtgtagtaacaaaggtcccctgccatctaggagcgcaaggggctgcggggagagggctggcagccagacgccagaagcagcgatgagcagggccctgaccttacctggagctgccggggcagctgctgggcgatcctccgcagcaggctgtgcgtgggcttctcggagcagagcagagcgaggcgcacgttcctgtccccacgcaggaggaggcctttcgccaggatgcctactcgcatgacgcctttcaggacccgagtctggggggcaacgctgctgtggggacaaagccacagacgtgcgccatcagcggagagacgcggggtaccccagctgcctccctcctgagctacggggaccctgcaagttacagagcctctctgtgcctcggcatcctcatccatgaaatgggaccaggccgctctgtcggaggcgcttgcgggatgaaatgagacaccgtgagatcgatctcggaggtgctgtcaccgggcatgcctcggagtagccgggacgcgtggccaaacccacattttccttccttgtgagcaaacgctaagccccaggcccgccccgcgaggtctggtggctcccgcgttcacggactctgtcaccctgttgtttcggctccacatgggttccagagaggacagaaagcaaggctgctttctgctcttgcttcacgggggttaagaaaattcacaaacctaggccgggcgcagtggctcacgcctgtaatcccagcactttgggaggccgaggtgggcagatcacttgaggtcaggagtttgagaccagcctgaccaacatggcgaaaacccatctctaataaaaatataagaattagccaggcatggtggcgggtgcctgtaatctcagctacttgggaggctgaggcaggagaatcgcttgaacccaggagatggaggttgcagtgagccgagattgtgtcactgaactccagtttgggagacagagcaagactccatctcaaaataatgataataataataataataataataataataataataataattagctgggtgtggtggtacattcctgtagttccagtacttggaaggctgaggcaggagaatcacttgaacctgggaggcagaggttgctgtgagccgagatcgcaccactgcactccagcctgggcaacagagcaagactcagtctcaaaaaagaaaaaaaaaaaaaaaaaaggagagggcagcttcctgggcgctccttgtattgggacactttgcaacccacaggtgcaaggctcacatttcctatatggagctctgtgctccagcaaaaggaagccctcaggccaagtggatcagccagacacaaaaggccacacggtgtgcgaccccatttctatgaactgtccagcacaggccaatccacagagacagggcgggcacgcatgggtgcacgaaacaaaaagaggagtttgcttaattgggacagagcttctgtttgggaagatgagacagctgtggagatggacaggggtgtagtttgcacgtgtgaacgtgcttcatgcccctgaactgtgcacttagacaggttaaaatgctcagtgttgtgtgatgtggattttaccacaatagagaagcattcaaagaggaaagtgaacccgtaatcccggcactttgggaggccgaggtgggaggatcgcttgagcccgggagttcaagaccagcctggctaacatagcgagacctctccctgctacaaagagttaacaattagctgggtgtggtggtgggcgcctgcagtcccagctactcgggaggctgaggcgggaggacagcttgagcccgggggtctgagggtcagtgagctctgatcgcgccattgccctccagcctgggtaacagagtgagatctgtttcttaaaaaacaaaacaaacaaaaaaacaacaacaacaaacagcagctgccagagcaggaaaggactttgaaaaaaggtaactcccgctcagatgagttatctccatggcaattacttagacgacgtggggactttctcacttcctaagaatcacaggggttgggagctgattcacacgggcactcagtgacatgaactactctgattactcagtcactccccaaggcggagaagtccgtcagaatcacgctcagcttttccttttgccaatgaggaaactgaggtttacagagactgtcagtcccttgtgaactatttttagatgcgccttcaatagcaaaagggaatgctaaggcattagaacagcacggatcacccgctgcaaaccagcctcgttcagtgccgagaagctccagctctgagacctggggaacttcctactcctggggctggaaagctgccgcgggccaccgacggctccaggcccatcagagctaggggttcctgcagggtctcgtcccgaggagctgacctctgtcctggctgagagccgggccctggggaaggggatctccaatgacctgcgcttgtcaccctcttcctctcggcggccccggtcctcctcggccagtgtgtcggacaccagcttgagggcccgctctgcgtgggacacggccctctgcacggccaggagctcctgctccgtggggtagatggtggcgtgcttgcacatgacgtgccggtcgtcgctggacgccggccgccgcccgggctgtggggagaggccgcacgtgtcaagggtggtctgtggggacccttggggagtgctgggcaggcgggcaggtgggggcaggtggccgtggccagccaggttacgaggcggcagcgtggccaggtgagaatccagtgcacacagagagccccggggtggggaacagggaagtacctcgggctgccccgatggctgcaggaagctcgggtctgagtgaaggaatggggggaaactccgccacctttggccatattcttaaatttccagaccagaggcttttgagtcagcctgggaaccctttctcacagcaaggtgcaaatccgaggttcccattgaggccgggcgcggtggctcacgcctgtaatcccagcacttagggaggccgaggcgggcggatcacctgaggtcaggagttccaggccagcctggccaacatggtgaaaccctgcctctactaaaaacacaagagagcccggcgtggtggcgggcgcccatagtcctggctactcaggaggctgaggcatgagaatcgcttaaaccctggaggcagaggttgcagtgaggccacgattgcaccgctacactccagcctgggcgacagagtgagactctgtctcaaaaaaaaatagttcccatcgaacctgggggctcgggctgcggggacaggtgcttctgagaagagacagtagtagccacagaggcatgaggctccccaagggaggcgaccacccggggctccaggaagcagaagggatctctgtggccagtggcaggggctggggtgctggggctcccatctgtggagtgaggaggcctgggccatggagccccatcccctgagtactatgtgggagttggggggaggccgggtcctcccgaggaggtgtccgctgctccggggagtgtgaggtcgcccgcgtttgcacacagaggaaactgtacctacctggagtggggcgctggcgggtgactccggcctgcccatgagcagaggctgggcccagtcgggcggcgcgtggggcggcacgtcctggggtggctcctcctccagccgcctgcaggaccgagacgtgacagagcatggtcaggccagcagtggccctaagctgggggcaagtcagaaacactggggccttatgctcccagcaaggaaggaagggccaaagctcttgctggggctccactgcactgcatgggtgcctgctgtatgcacagaagactgaggctgggaaggctggtgtggggggcagccaaagacaccccttaggcaaatgaggcccagcccgggcagccatggccttcaggaggtcctggttcccttcccaatgcagacctgctgctgctggacacaccagagtcagatgttacatcagaaaatgctctaggatggacacaggggacactgggaatgaggggacgctaggggatcagggggacacaggagactccaggggtcaaggggactcaggggataccaagggtaaggggacacagggtcatcaggggtcaggagacacaggaacaccaggggacagagggacaccaggggtcagggggactccaggggtcaggggtcacatggcacactagaggtcgggggacacagggacaccgggggtcgggggacacagggacactagaggtcgggggacacagggacactagaggtcgggggacacagggacaccgggggtcgggggacacagggacactagaggtcggtggacacagggacactagaggtcgggggacacagggacactagaggtcggggacacagggacaccgggggtcgggggacacaggtcacaaggcacctctgcagccgtgtggtccagcgagttggccggcagtgtccctgcgtctacggaggccctggagcccacgtgtcaggtccgcacgccactgtgcccttgcccgtctgctctggaaccctctcacgctcccacaccaggacgtgcccactgcccgggcacccgtctccccccactgctcgagagctcacacggaggagctccgtaatctgcagcagtgggcgtctaggttccacgctggacctgccctccctcaccaggcccccttgccaagacccgcagccgggcacctcctctccgcgtgccagcgccgcagctgctccagccgctcctccgccaggtgccgctgcttcctcatgcgctcctccaggaccttccgagcccggctgctgggctccgtggcaatgggaaggtccgggttcactttcttctggaaaggacaggcaaggctctgagagtagggaccttgctttagacagggatgccaggaggatcttggggtgcagggagaggcccagagactagaactgttgggctgaaaaatctcccaaagcctttttttttttttttttttttttttcgagacagagtcttgctcttgtctcccaggctggagtgcaatggtgtgacctcggctcactgcaacctccgcctcccgggttcaagcgattctcctgcctcagcctcccgagtagctgggattacaggtgcgcaccaccacacctggctaatttttgtatttttagtaaagatttcactatgttggccaggctggtctcgaactcctgacctcaaatgatccacccaacttggcctcccaaagtgctgggatgatagacgtgagacaccgcgcccggccgaagatacacttttgagacgaggaccaagacgttgaaaacccagaaaatcacccctccctcttaagttcgtcggatcacacgcgcggaagaggcccgaccacaggcctcccagcgcccgccgggccctagcacagcccggacgggtgtcggagctccccctgctggacgcacccggtactgcagccggtgccgccgccccctcacgtgcaggtccttcgcgttaaggtcgttgaaactgcactcgcacagcttgcagtggaagcgaagcactcgcccttcgtcgctgaacacctgagacacagaacagccgcacgcgcaccaggcacgaggcggggtgggatgtgagatgctaccgctgccaggtcgcggcggagccttcctccttgctgctcattttatttatgtatgtctttttagagacagcgtcttgctgtgtcacccaagctggagtggagtacagtggctcggtcttggctcactgcagcctcaaactcctgggctcaagcgatcctcccacctcagcctcccgagtagctgggaccacaggcacacgccaccatgggaggctggaggattgcttgagcccaagagttcaagaccagcctggtcaacatagcgagacccccatctctacaaaaaaaataaaaaatacaaaaattagctgggagtggtggctcatgcctgtagtcccagctactcaggagactgaggtgggaggattgattgagcccagaagtttgaggttgcagtgagccatgatggcaccactgtgctccagcctcggtgacacagcaagaccctttctcttaaaagaatcccaggcctacaggcaaggcagaggaaacccagccctgcctctttggcacgcacaaggccaaccggggtctgaactgccgctggcctgggagctggcagacctggcccaggagctcggctccactgctcaccagcctgaccttggcaggtcccagggtcccgcaggcccaggaaaggggctagacagaagggcttccaacctcccggggagctttctactgcccagatcccttccaccttccagacagacggctccgcagggtcccctgttgggaatgcctcggcctgtctctggccctcacggggccatattcatttcctgctgataccaaaatccggcacccaaagtgtcaagcgggtctgcacggggttttggtccatggaggtctggcctgtgcagctcaggaacggggatgggtctgtaaatctcgctgggagaagccgggtgaggtctcgaagcctgatccatgggaaggtccttccctgaccggggcaccaggacttgacagcctcgacttacctcctccacatattccgggcccaccggctgcgcatcagagcagcccgcgggagcttcctttgagcctccttgggtaggtgctccgggaccctctaatttaggttgggctggtttcccccactggggtctgcagcctgctgcctgtggctcaggaggccctgaggggaaaaaccatgtcacttataccctgttccaggagaaagcactgcagctgcagacccgccaggcggcatggggtggagagccacccagactgcaggctgtgccatccccctccctcctgtgatgtcagggggaatggccccggacagcaacctcgctctccctttcatgcctgcgtgtgacccagccaagaaaccgaggccaatttcaatccatccggggagaagccctggttttaggccctcgcttgaggaacccaccgacagcacaaaatccacagttaatagaccatgaagtatcaggcggaccaaggctcgcacttaacctacccccgttaggcgaaatgatggagcctcggggggagacaaatatctttgttataagaatgacttgatggtttgatcttcaaaatcatgttgctattcaagaatcaacgctgctgaggctaaaaatagaatgtggctccctcgacccctgcccacgcacagcacggtggtccagggcagagactcttagacagacccgggttccaattccacctccaccgtttacggcttttccatctacacattgggactggtgacaacattgactcaaatgagttgtgggctgggcacagtggctcatgcctgtaaacccagtgctgcgggaggccgagttgggaggatcgcttaagcctaggagtttccgaccagccccagcaacatagcagaaccccacctctacaaaaaaaaatacaaaaagtagtgggatgtggtggtgcacacctgtagtcccagttactcaggaggctgagctgggaggatcgcttgagcccaggaggtggaggctgcagtgagctatgattgcacctctgcactccagcccgggtgacacagtgagactctgtctcaaaaacaaaacaaaacaaaccacgaaaaaagagttgtcgtggaggtaaagcgaagcaatgcacacaaagcagtgagcagacgcctggcatgtaatcctagttaacgcgggtcagctctgacagctggggctttgcacgcagggaaggtagggtcacaggcagaggggtgtgaggattccaccttcatttcctggtacccatataactctgattctgagcccaatttgttcaccgtgagcaccagggcatgcaggggagcacagtggaggtggcagcccagggaaccctgtaggtgcagggtgagggcttccagagaaccccagcacccggcaccaggccagattctaccagaagaggccgggcgcagtggcttacgcctgtgatcccagcactttggaatgccgaggctggtggatcacttgaggtcaggagttcgagaccagcctggccaacatggtgaaaccctgtctctacgaaaaatacaaaaattagccgggcgtggtggtgcatgcctatagtcccagctactcaggaggctgaggcaggagaatcgcttgaacccaggaggcagaggttgcagtgagctgagatcgcaccactgcactccagcctggaggacagagcgaggctccatctcaaaccaaaacaaaacaaaaaaactctacaggaagaaatggcattaccattttattggttctgccagcactctctggaaatggtctcaaagggtctccaaggttcagggcggtgtgggccagtgggaggccatcttgctctgcaggaataagggagagacggcaccagccagcccctcaccaccccccgggaagacatgacgaaaatcgactggatggtagattttctcacgaaactttcactaggcggccagggctctggtgggtacacgaacacgcatacagacacacgtaccctcgcataaggccttcgaggccacgggtctcttggccagcgctggcctgctcgaggcacacacgctggggccagtgggggacgtgggcttggcctctgccccgggggggctctctgtggccagtgcaggctcgagggtgggaatgggcttccccagtttggcgtgcagcttgaagacctgcaacagacagagccgggctcccgcgtgagggccgctcccagcctgatggcctttttcaagaggcaggaagggcctccacgggcgtgcagcgcgagtgtgggctggccggtcccagggacccccctctcttctctcctcctgctctctggataacacccactccagaaggcccttcccaggtggcctcctgccttgcacacgtgcttgtgacttctctagcacggtgacactcctctagtgtgtgagcacgtggctcaccggctcacacggacgctcttcctcctcctccaccacgtgggctgccaggtggggccgtttctcagcctcccaagccccagcctagtgctccctgactgcccgggactcagcatgtgtggatggatggtgggtgtgcacgtgtccctggacggacacccacgttctgcacgcacgtgtgcacatggtcacgtccgtattctggccgtgccccattctcagcacctctaggtacaaggtgtttctggcaaaggttccgtgtgcacagggccactgtgtgtgtgctggggaccatctcagacacacttcccagctctgtctctgacacgctgtaccctggtacaagacctgccctgtaccccccaaccccacaacgggcagcagggcctgcctgacccccagactgagccccagcctgtgggggtgacacctgcagctctgccccaccggcccctagctctccggtccccaggccaagtctccttcccccgtttctctgccccgctccttccctcctccatgcctccctgctcattcctctttcccctgtgggttcacacgggccctcagcaagctgtcctgagccgagccagggaatgaggccctggatgagcctccaggcagctgggggagagaagccaggtcctcagccaggcctctcagggtggctcagcctgacagcccgggctacagcacaagccagctgtcccctccctgctctcaggtggggactccatcccctccccgccgaacatgacgaaacccaggcctcttttttttttcttttggcgacagagccttgctctgtcgcccaggctggagtgcggtggcgagatctcagctcactgcaacctccacctaccgggttcaagcaattctcctgccttagcctcctgagtagctgagattacaggcacgcacccaccacgcccggctaatttttgtatttttcagtagagacggggtttcaccatgttggccaggctggtctcaggctcccaacctcatgcgatccactcgcctcggcctcccaaagtgccgggattacaggcgtgaggcaccacgcccggcctgacccagaccttactaaggcctcaggagaacagtgatactacagcagggagtgtgaagagcaagacctcaaagggaacacagcattgggtctcatcacagggcaagccctgtctgtcaccacgcccgaatgccaagctttcttggaagtccgggtgtgagtgtctcggccacttcatgtttttgtgcaatgagcaggaaccctttttataagtggaaaggagtccccgcacggtggctcacgcctgtaatcccggcactttgggaggctgaggcgggcagatcacttgaggtcaggagttcgagaccagcctggccaacatggtgaaaccccgtctctactgaaaacacaaaaattagccgggtgcggtggcggatgcctgtgatcccagctactcaggaggctgaggcatgagaattgcttgaacccaggaggcagaggttgcagtgagccgagattgtgcccctgcatcccagcctggggaacaggacgagactttgtccccattaaaaaaaataataaaatgaaaactaaaataaaataactggaaaggagtttggatccttgaagatgaggacgcatgggcctgggcggctggcccttggggcgcgctccacttggggaggcttctcccagctccctctgatctccccaggtacctctgtgggtcccaagtgctgacctgggggccttctccccagggtggcagagcctgggccgggcggggccgtaccttctggtgcttggatccccggatgtgggccgcgtaggcgtccgccccggtgcaggacacggcgcacaggtcgcaatgcagctgcgcctgcaccccgcgcgggctcccgttgggctgcacgcctgtcttctgggccgcctccttctttctgtgcttctgccctcccagatgttcccggtaggtctgcggcaaggggtgagaggcagcctgggcgggggtttgcacactggccactgtcccctcccctgcaggcccccggcttagcgcgagggaactcggtggtaacagaggcccgctgtccccaaccctccattccctggtgccatggaggttccagtgtccctttatttttcttatttttattttttgagatggagtctcgctctgttgcccaggctggagtgcagtggcacgatctcagctcactgcaacctctgcctcctgggttcaagtgattctcccgcctcagcctcctaagtacctgggactacaggcgggtgccaccacacccggctaatttttgtatttttagtagagacggggtttcactctgttggccaagctggtctcgaactcctgacctcaagtatctacctgctttggcctcccaaagtgctgggatgacaggagcgcaccaccgcgcccagcctatcttcttactatagacgtctcaaattttttttttttttttcgagacagggtctcactctgtcacccaggctggagtgcagtggcgtgatctcagctcactgcaacctccacctcctgggttcaagcgattctcccgcctcagcctcccaagtagctgggactacaggtgcacaccaccacgcgtagctaattcaagtgtccctttatgaagcccacgtaacaaacccacaggctcagactgctagacataaggtttcttccttcttctggaattcaaggagtttctttggaaagcatgctccatgcatcacacattccttttgggggctgctgtatacagaaaattctgacttcagaattcaacgtcagaaaccaagcaagggcacctgctgcccgaaggatagtcacgtacacttccatcttaggaaactgctaatagacacaggggctccacccgggggaagccaccgtgagtcacaggcctacgcatccggtactactgggcccaaaatatctgattgcgtctggggaagcgacagccaagcccttaggcagaatcctgggtgtgctgcttgaaatcctcaaatgaagccggccacagacaagacgtggcaggagggccacgaaaccaacacgccctgacaatgccaagaataaacattctgcagactgaaaaatgcccctgaaaatactggggcacagtgggcactgccccgtcacctgcaggccaccggcttggcacacaagaactcagagacattgtctggttttagggaagaaaaataggacgtgggagaggcatacattttactgtatgcatgctctctggaacttaggaatctttttttttttttttttaagacggagtcttgctctgttgcccaggctggagtgcagtggcgcgatctcagctcactgcagccgccgcctcccaggttcacgccattctcctgcctcagcctcccaagtagctgggactacaggcgtctgccaccacgcctggctaatttttgtatttttagtagagacggggtttcaccatgttggccaggctggtgttgaactcctgacctcaggcgatcctcccacctcagcctcccaaagtgctgggattacaggtgtgagctaccacgcccagcctggaatttagcagtcttgaacctcataaatatattacctaagcaatagaataaatacgcatccctgtgcacacatactaacttagaaagagagactgcctgtggaatagagaagactctggaaggatacacaccaagatgctaccgctaaatcatttcagggtggagggattatgggggactataggtaggtttgtgtgtgtgtgtgtgtgtgtgtgtgttttgttgttgttgttgttgttggtttttggggggttttgtttttttgtggacaaagggtctcgccctgtcgcccaggctggggtgcagtagcgtgatcatagctcactgcagccttggactcctgggctcaaacgatcctcccacctcagccttcaaagtggccaggactataggtgcgtaccaccatgcccagctaatttttaaattttttttagagacagggtttcacccatgttgcccaggctggtctcgaactcctgggctcaagcgatctaccggcttcggcctcccaaggtgctgggattacaggcatgaggcactgcacccagccagtaggctgtctttgtgcacttttggcgtatactgcagtaattagccacgtgggcttcaacacatcttggtttgatttctgcctgggtcactaaaactgactctgagttcctcaaagtactgaccctttctgagcctctgggattttatctgccacacagagatggtagccacaaggcagatataaggattaaataacccacacgggcctggcgcagggactcagcttgtcatcctggcactatgggaggctgaggcagaagaattccttgagcttaggagttcgagaccagcctgggcaacatagtgagaccctgtatctacaaaaaaatttttttttaaatagccaggcatggtggtgtgcacctgtaatcccagctactcaggaggctgaggtaggaggatcgcttgggcccaggagttcgagactggacctgggcgacatagtgagaccccatctctattgaaaatttaaaaaattagctgggcatggtggttcgtacctgtctcagctacttggaaggctgaggggaggatcacttgaacccaggaggtggaggctgtagcgagctgtgattgtaccactgcaccctagcctgagcaacagagcgagactttgtctccaaaagaaactcaaacttctatgcgagcactctgcaaagaaggccggggtctctcccagcatgagacacagtggagagctgctggaggaaagagtctgagacagggaaagggtgatctggggcgggaggggtcctgagcagggaccggccccccatccccagctgggtcaggggtcctgataacggtgtcctgagccttctcacacctctccagagtctgcgattgcagactccgtgtctctccgcggtccagagcttcctttcagagtattaaaaacaaaagaagatcagggtgtgtgttttgcaaagacagagctctagggtctaattatctttccaggaattgagcccacgatctcagctgggtgatttgcaagctttaaaatctcaagctcgtgtgtttggtaaagattctttcacgtatgtcccaaacaagcactgccaagcacaagcacgcatgcacacacacacacgggcgcatgcacacacatacacatgcaggcatacatgcgcacacatacacacacgcacacacatgcacacacatacacacacgcttgcacacacaggcacatgcaggcacacatgcgcacacatacgtgcaagcacacatacatgcacactcacgtttgcacacacatatgcacacatatacacatgcataaacacacgcacacatacacactcacacttgcacacacacacaagcgcttgcacacacaggccatgcatacaacatgcaagttaacaccagaccttctttcagcaggcagcgaccctgaccaccccaccggcgcccacattcgggttcagacgttggggacagagaggtccctggggcctgcccatggcaggagggcgactgacctgggggccagcgcagctgatcttgcagatgtcgcagtagtgaagctggagctgcctgggccccgccttgggtctcggcagcttgctgggaagcggtggcttcgagtcggccctggggctgcttcctgagcctgcaggcgcgggcggcgggggcagctgctgcgggggtcccgggggaggcgggggctgcgctggaggatagaaagggctggcagcggagtacaccgacgcgtcatagttcgggtagcttggtgctgagcagcagagaaaacaatgagtcggggggagatgctgattccactgagttgaagtggggaccgacgggcagaccacctgggcaaggaacgctggtcttacccgtgtaggcggtgcaggtggggttgtaggagggcggggggtaggaggtcacgatggaagctgacgactcgggctggacgcctgtcgccgtggggtaggtgtatcccgaggacaaggtgctcgctggctgtccggactccactatgggcgcctgctgtgggggctgagcgtggctgtgactgccatgggggctgggctgcccgcaggcttcttgggtccctaggggacagggacaggccctctgcagagccaacccccaccccactgtccctcacctgcagatgggccctggactcaactggctggaacacgctagatgcttaagccaggaccagaggccagagccttgggccaggtgctggcagcgactcgcaggttaccttgtgcccacctctcctttccagagcccggcttctctctcctgccatgggggaggagggctgtgggtgccctagacaagctcctctgcatctccagctccatcacccacagagctcacctcctgccaccccgggaaagcttccttggaaaaaatgttagctgcattttcagtcctcactttccttcattcataggcccacacctggcagagatcccagggcccatctgagcagccagctctgaggctcacctgcaaatctaggatgtttttattatcattattattatttttttttttttgagtcggagtcttgctttgtcaccaggttggaatgcagtggcatgatctcggctcactgcaacctccaccttccaggttcaagtgattctcctgcctcagcctcccgaatagctgggattacaagcatgcgccaccctgcccggctaatttttctatttttagtagagatggggtttcaccatgttggccaggatggtctcgatcgcttgaccttgtgatccacccgcctctgcctcgcaaagtgctgggattacaggcgtgagctgctgcacccggcctttattttgttttttttttttattttttattttttagagacagggtcttgctctgctgcccaggctggagtgcagtggtgcgatcacagctcactgcagctcagttcctgggctcaggcgaacctcctacctcagcctcctgggtagctgggactacaggtgcacaccaccatgcctggctaatttttttgcattttttgtagagacgggggtcttactatgttgcccaggctggtctcgaactcctaggttcaagcaattctcccacctcgggcctcccaaagtgttgggattacaggcgtgagccaccgtgcccggcctctaggatggttaacatgtaactttcacggggtgcagtggctcacgcctgtaatcccagcactttgggaggccgaggcaggtggatcacctgatgtcaggagttcaagaccagcctggctaacatagtgaaaccccgtttctactaaaaatagaaaaaaattagccaggcatggtggcgcgtgcctgcagtcccagctacttgggaggctgaggcaggaggattgtttgaacctgggaggcagagggtgcagtgagctgagatcgcaccactgcactccagcctgggcaacagagtgagactccgtctcaaaaaaaaaaaaaaaaaagaaaagaaaagaaaagatgtaactttcaggccgggcatggtggctcacgcctgtaatcgcagcactttgggaggccaaggcgggcggatcacgaggtcaggagatggagaccatcctggctaatactgtgaaaccccgtctctactaaaaatacaaaaaattagccgggcgtggttgcaggcacttgtagtcccagctactcgggaggctgaggcaggagaatggctttaacctgggaggcgaagcttgcagtgagccgagatcgcaccactgcactccagcctgggcaacagagcgagactctgtctaaaaaaaaaaaaaagtaagtttcccaaggtttccctgtgctgcggggagcgtctcctcgttcccagccccgaccctgcagatggctcacctggctggccggagtctgcggctgtcatgcgcccagactggagggcagcagactggaagtacggcctgtcctcatagctcctggcagctgctgactgtccgtagctgtaactgtcctatgtgggggtttcggcaggagagagacagagaacggaggagagcagctcaggcggtgggtgcgacgcgccctgccacactgcactctgcacttagtccttcctgcagcgctggctcctaagcgtctgcccaggaccaggccctggcccggaggcagggggcagggggcagggggcagggggcagggggcgtggttgacacagcagctgtcatggagccgacactaatttccaagagttcgactgcaatttacaagaggacgcttggtgcggcaggagagggcgggtttgcagggagaagcccccgaggccttggcaaggaaatggagaggggaggaagagggtggggtcaggtgggtgctgagcttgagtgacagggtggcctctgatgccgttgaccgacacaatctggggacgaggtgcgggtggcagagctgggaaattggagcatggtcacgggggacatctttgcgacaccaagtgggaacacggtggctggatctgcagcctgagtgcctcggttgggaaggtgaggtcgtcagcacccaggtgcaccccacacaccacagactccctcttagaaggtaggaatctggagcgtggggaaggtggggtgagtcctggtctctctgggcccaggtggccgaggccatctgccctgaccagggaggggtcctgtaacccaggcgaccctcctcctccttcatagtcactgctgaagctgggacaaagctctgtgcgccgtcactgtccccactgccccgacgtggaggtacgcatgcggcctgtccccgagagcagtggattctttcggaagcgactctgccctgatttctccccaccacgggtacgcaatgccagcagaagggtcccgaaggaaggatcacggttaagaggcctgggagaaggagtagctgtgggaagcccaccgctctcacccatgcaaggcgacccacgtttcccggcaacgctggtcaaagaaaggactggatacctggtaggtagccatggtggtggccgtggggacgggctcctggggtcggctgccgtaggcgaagtcctggccggagtggggctggtatccaccgtaccctgccggggcagctgggggaaaggccgggttcacggcagggtccatcccaggagtgggttgtgcagtatagctggcccccacagtgggcaggggaagggtcggaggctgggcgctagaaccacaaacacacaccaaagccccaccaggttagagcgagttctcaggtgcactgagttgacggtgtcaattccagccaccactggacctgagctgccctgcttggtggagaccctcctaggagcccaggcacggccggaagcactttacacaaattaacaccgtctcacaacaacgctgtaatgctgggcctatcactgcacccaatttacagatgaagaaactgaggcactgtcagtggcagagctgggactcgaacccatctgacttccgctttgcagatgatctacttgtgtggcagggctttttctccatgtcaagattcttcaaagaaaattgaacttttttattttttgagacagggtctcgctctgttgcccaggatggagtgcagtggcacgatcttagctcactgcaacctccgcctcccaggttcaagcaattctcctgcctcagcctcccgagtagctgggactacaggcgcccaccaccacgcccagccttttttttttttttttgtatttttagtagagacaggatttcaccgtgttaactaggatggtctcaacctcctgacctcatgatctggccgcctcggcctcccaaagtgctgagattacaggtgtgagccaccacgcccggccagaaaattgaactttaacagcacagtgtctggccgggtgtggtagctcatgcctgtaatcccagcaccttgggaggccaaggcgggaggattgcttgagctcaggtgtttgagaccaacctggacaacataatgagaccttgtctccaccaaaattaaaaaaaaacaaacaattagcgagtgtgatagtacacgcctgcagtgccagctactcaggaggctgaggtgggaggatggcttgagcccaggaagtagaggctgcagtgagctatgatctcaccactgaactccagcctgagcaacagagtaagactctgtctcaaaacaaacaaaacaaaaaacagtacagctgtccctcactatctgcaagggttgagttccaggaccccctcagatgccaaaatccatggatgcttgagtccctgacatagaacgatatagtgtttgcatataacctaaacatatcatcccatatactgtaaatcatctctggattacttataatacctaatacaatgtaagcactatgccgatggctgttacattccattgtttagggaacaatgagaaggaaaaaccccatacatgttcagtacagatgcatttttttcccaaatattttccacccttggctggttgaatccatggatgcagtgcctatgaatgcggaaggccaaccgtattttctctttaaaaaaaaaatttgtttttgagaaagggtctcgctctgtcacccaggttgaagttcagtgctacgatcacagcccactgcagcctcaacttcccaagctcaagcaaccctgcctcagcctctcagtagctgagaacacaagtgtgaaaccatgcccagttaattctttaaaaaattttggtagaggtggggtctcactatgttgcccaggctctgactgtattttttttaacagaacaagtcagtccacctgagtattaaaataattactttagttagcactaaactaataactcttcactaaaaagaatgagtctttgtagggtttgcacagtgccgaggcctttgtccacatggcctcattcacccttcagaggacatgcggcaccatcgctccccacggtctagacgagaaaacctccaaggaggaccaggggctcatgtcaagtgcaggggagggttcagacccagatctttctgaccccaatgccccttgttcagctaaatatcagctacccagtagacagttctggagtctaaaagcccatttgccagggaaaagtatcagtaaagattttagcccaataccgctatggatatatattaaaaagtgaacctccaaccccataggggaaggagcaaggtatgagggtcattttggggaaaatggattagaaggcaaagaggctctacaccacctggcccccaaccgggccctgctgtagactcctgccagccaggtgagtcatccgcagtgtcagggccggggacaaggagacattctctgcggcacaggaaaacctcatgaaagttacagcttttttttattttttgagacagagtctcactctgtcacccaggttggagtgcagtggtgcaatctcggctcactgcaacctttgcctcctggcttcaagcattcattcctctagcattttcacacacttgtcctgagtgtccacatgctggacattcatgaacaccatgactgtggacacttgatggacaccatgacacagacacccgatgaacaccatgaccatgacactcgatgaacaccatgactgtgacactcgatgaacaccgtgactgtggaacttgatgaacaccatgactgtggaacttgatgaacaccatgactatgggacactcaaacaccatgaccatgacactcaatgaacaccgtgaccgtgacactcgatgaacaccatgaccgtgacactcgatgaacaccgtgaccgtgacacccaatgaacaccgtgaccatgacacttgatgaatgctgtgactgtggaacttgatgaacaccatgactatgggacacccgatgaacaccatgaccgtgacactcgatgaacactgtgaccgtgacactcaatgaacaccgtgaccatgacacttgatgaatgctgtgactgtggaacttgatgaacaccatgactatgggacacccgatggacaccttgactgtgacactcaaacaccatgactatggacactcgatgaacaccatgactgtgacactcaatgaacaccatgattgtgacatttgaacaccatgactacagacacctggtgaacaccatgactgtgacacacgatgaacatgactatgacacttgatgaacactatgactgtgacaatcaatggacaccatgactgtaacacacgatgaatgtgactgtgacacttgatgaacaccgtgactgtgacacacgatgaacaccatgaccgtgacacgtgatgaacaccatgaccgtgacacgcgatgaacaccgtgaccgtgacactcgatgaacaccgtgactgtgacacacaatgaacaccgtgactgtgacactcgatgaacaccatgaccgtgacacccgatgaacatcccgacaatacattcgatgaacaccgtgactactgacatttgatgaacactgtgactatggacactgaatgaacagcatgactacagacacctgatgaacactatgacagtggcagtactcctgttcccacactccctcccgtaggtggctatgaagaaaacagaactacagagtgagtgctatccaggctgcactgagcaccgaccgatgagccaaagagaggaaggtggaaggttccatacgggagctggggcagagcagagctggcctcagctgtacagcccttgctggagaccaccccagcccctcactctcctccctcctcgccagcatttctttgtcctcctggcagccagagaggggtcttttcaaagtacagccctaaccatgccatctcctgctcaaagccctcccaaggccctgccacagccacatcccaccgatcccatccccccgtgtctatggctcccgtccccgctgcctgcaagtggctgctcagtgacaccctgggacgagccctcctggagcccctgtggcctgatgctgatcagcctctgtcccctggtcctgctttttcttcttcctggcaccacccagtatacactgcacgtctgtccacaggccgtctcctccctggtcccgatgccctgagatgcaggaccagctgcagctgcccagctgtctcccggggccgcggcacgtggcatgcagcaggggctccatgcacatctagggaggtcaggcacatgtgctgaacggcgcttgtgttggggagggctctgtcagacacctcagcctgtttctccaagattctcctgaaggaccagaaatcggcagctctacagaaggatggacatgtcccctgggaccgcacacgctctgatctgcaccatcgtggggtgttttcatctctcccaggaaaagcagaagggccctatccataaagaagaaacattcagattccacagatcggccactgtgagatttgtgtttctcttctggaagtctcagagactttattggccaaaaagtcgattaggaaagtggtccaggccgggcacatggctcacacctgtcatcccagtactttgggaggccacggcaggcagattacccgaggtcaggagttcgagaccagcctggccaacatggtgaaaccccgtctctattaaaaatacaaaaactagcccagtgtggtggtgggtgcctgtagtcccagctactcaggaggctgaggcacgagaatcgctggaacccaggaggcggaggcggaggctgcagtgagccgagaccgctccattccactccagcctgggtgacagagcgggattctgtcaaaaaaaaaaaaaaaaaaaaaaaaaaaaaaaaaaaaaaaaaagcagaaagcagtgatcagtagctctcttaatctccttggggatgacacttcttttttatgacaaaatatttcaaacataaaaccacttaacaaacacatatcactgagatgggtaagtgctaatgtttggctgtatttgtgtcagagcttattgtttaaatacagagaattgaagcaccacctggatcctattcctttttcttcctccctagggttggtggctgtcttgtctaatcatgattcttagacttttaactacatatgtatgaaggttttgtttgtttgtttcagagacggggctcgctttgttgcccaggctggatggagtgcaatggcgcgatcacagttcactgcagcctctaactcctgggctccgtatgaatctgtatacaacacggtgttgtgtttttcagttacatgtgtgcaaaatgatgttcttattgtgtatgtcaccccgcaactcgcttctccaatgcccggcaaaccttgtctgaaatgtactgatacgagtccacacggttcactgattttaactccttcttccctacgctgtcctcctacctggacaaaggatcctctgcccaggccctgcatcttagagtttcatcgcccagtacagaagcagcagccacacgtggctgagctcttttttgtttgcttgttttacttttttttttttgagacagtcttgctctgtcgcccaggctggagtgaaatggtgtgatctcggctcacagcaacctctgcccctcgggttcaagcaattctcccacctcagcctcccaagtagctgggattataggcacctaccatcatgccgggctaatttttgtatttttgtagagacgaggtttcaccatgttggccaggctggtcttgaactcccaacctcaggtgatccacccgtctcagcctcccaaagtgttgggattacaggcatgagccactgtgcctggcctgattgttttagatatgaggtcttgctctgtcgctcaggctggagtgtagtgacgtgatcatagctcactgtagcctcgaaactcccaggctcaagtgatcctcctgcctcagcttcccaagaagctgggaccacaggcatgcaccatcacacaaggctaattttgtttttttggggtagagatggggtcttgctatgttgcccaggatgacctccaactcctggccttatgcgatcctcctgcttcagcctcccaaagtgctgggattacaggcctaagctaggctgagcacttaaaatatggcttgtgcagctgaggaacagaatgttaaattttaaaatttgtttcatttcagttaatttagattttgatggccatgcatggctggtggtgaccgggggccagcatggatctaggtcacgccggtcactgcacagatcacacacatacacacacacatgtgcatgagtgaagaagcacatggtgactcggtgccttgttcgctctaggttggccacggttcagggcccgggagacccaggccccatctctggctctacaccatgaaggcaaaaggcgaccacgtcagaatgcttgcaaagtttgaggattctgcctcccagctacagagagagctccaacgtggtttcagagtgcaaggagggtggaggaaagaccacccccttcgcaaaccctcctgttgggaacacggccggcaacgggtcttggagaggaggcctcactcctcggcagggccatggggccgtggccttcctcttctgtgggtctgatttgtggtctcagatgcacccatggatctgtgtgttcaaagcatggttctggcaactgaggagcattttgtaatatgcaggtgcggtggctcacccctgtaatcccagcgccttgggaggctaaggcgagaggactgctggagcccaggagttcgagaccagcctgggcaacatagccagaccctgtccctacaaaaaataaaaaaaaattagccgggtgtggtggagcacctgtagtcccagctactcgggaggctgaggtgggagggtcacttgagcccaggaatttgagacatagccagaccctgtcaccacaaaaaattaaaaaaattagctgggtgtggtggggcacctgtagtcccagctactcaggacttgaggcgggaggatcgcttgagcccaggagtttgaggctgcagtgagccatgattgcaccagcgtactccagcctgggccacagagctggacactgtattgagacagagtctcactctgtcgcccaggctggagtgcagtgtcacaatcttggctcactgcaacctccacctcccagtttcaagcaattctcgtgcctcagcctcccaagtagctaggattacaagcgtgagccactgtacctggccaaaatccataatactcttaaacttgtaggtctgatgtgtcacaggtaaagcagagtgacttttttttttttatttttttgagatagggtctggctctgtcacccaggctgtagtgcagtggcatgatcatacctcactgcagcctccaactcctgggctcaagagatccttccacctcaacctcctgagtagctgggactacaggcgtgcaccaccatgcctagctaatttttttattttttgtagagatgggggtcttgctgtgttggccaggctggtcttgaactcatgagttcaagtgatctgcccgcctcggcttcccaaagcacaggaattacaggcgtgagtcactgtgcccggccagagtaactctaccatagcaacgagagaccctgagcattagaattgcacattgatgtttggaaaatgttagacagcatgcaattcaatttttaaagcaaagaaaccctgtagctgtatataattttgatctaaaaacttgagtcattacattatcttttccattttgtctgaaaaaatgacagctttattgagatataattcatttcctatagaattcaaccatttaaagtataaaatgtagtggttttcagtatattcacagagatgtacaattgtcacttcaatgcatttcagaacttttttttcttttttctttttttttttttgagacggagttttgctcttgtggtcctggctggagtgcaggggcatgatctcagctcactgcaacctctgcccccagggtccaagtgattctcctgcctcagcctgtcgagtagctgggattgcaggtgcacgccaccaagcccaactaattttttgtatttttagtagagatggggtttcaccatgttggtcacgctggtctcgaactcctgactgcaggtgctccacctgccttggcctcccaaagtgctgggattacaggtgtaagccaccgtgcctggcccatttcagaacatttcatgaccccacaatgaaaccccagcagaagggaaaatgtaatggtgcagccattgtggaaacagtctggcagttgctcgaaagttaaatctagaattatctcatgactcagcaattccactcctaggttcctactcaaaggaaaagaaagcagaggctcaagaaggtattttacaccaatgttcacagcagcactgttcacagtggctaaaaggtaggagcaacccaaccgtccatcagtggataaatgggctgggcgcggtggctcacgcctgggatcccagcacttcgggtggccgaggcgggcggatcacttgaggtcaggaggtcgggaccagcctggccaacatggtgaaaccctgtctctactaaaaatacaaaaaataactgggcctggtggggcgtgcctgtaatcccagctactcaagaggctgagctgggaggattgcttgaacccaggaggtggaggttgcagtgagttgagatcgcgccactgcactccagcctgggagacagagcaagactctgtctcaaaaaaattggatgaatgaacataacgtggtccatccacacagtgaaatatgattcggccttaaaaagaaaacaagtcctggccgggcgcggtggctcacgcctgtaatcccagcactttgggaggccgaggcaggcagatcacgaggtcaggagatcgagaccatcctggctaacatggtgaaaccctgtctctactaaaaatacaaaaagaaattagctgggcgtggtggcgggcgcctgtagtcccagctactagggaggctgaggcaggagaatggcgtgaacctgggaggcggagcttgcagtgagcagagatcacaccactgcactccagcctgggtgtcagagcaagactctgtctcaaaaaacaaaaaagaaagaaagaaaaaaaacaagtcctgacataggctacaaggtggatgaaccgtgaggacatcaggctcagtgagagaagccaggcacagaaggacaaatcctgtgtggttccagtcctaggaggtccctagaggtgtcagattcacagagacagaaagtaggatgtgggggggggggtgccagggaccggggaggggaaggggagtgagtgtttcacggggacagagcttcagtttgggaagatgagaaagttctggagatggatggtggtgacggctccccaaccacgtgaatgtgcttaatgccactgaactatgcacttattaataaaacggtaaaactggtcaattttatgttatctagactttatcataataaaaagcaaagaaacctcatatccactaccaatcacttcccctctccacccatctatcttgctttttaatgttaatagaaatttctgaatattataggaaagtaacttttaaaaaaacatacaaatgaagttaacttttcaatgttttacttttttttttttgagacagaatcttgctctgtcacccacactggagtgcagtggtgcgatctcggctcactgcaacctccacctcctgggttcaagtgattctcctgtctcggcctccggagtatctgggattacaggcatctgccaccatacctggctaatttttgtatttttggtagagacggggtttccaccatgttggccaggctgatcttgaacccctgacctcaagtgatccacctgcctcagcctccaaaagtactgggattacatgtgtgagccactgcgcctggcccaatgttttacatttaaattgcatttataatgaagacatatttaatttttgcacatttgtggtttaatggcatcttgtggttgaatcctttagatgagtcagggttccagcagagaacgaggcctggtactctgaggcctccacgtgggaaggaattcctctccctccctggagtctggaatggagctccccgtggcccactcccgggggactcagtctctgcagctagtgtctgtgctctgcagtttccaggcagaaccctgattgggaaagggggctgcagggttgccccaggtggtcatggccaagtaccacagctgggtggcttcagcaacacagacttatttattctcacagttctggagcgtggatgtcctagatccaggtgtcagcagggccggtccctctgtggcttgcagacggcagtctttgccctgtgtcctcacgtggttgtccctctgtgcgtgtctgtgttctaatctcttcttacagggatccagtcggattggattagggcccattctgcattgggctaaattgattaagtttaattcatttcaacttaattctctcttcaaagaccctggctctccaactgcaccctagactgggcagcatagtcagaccctgtctctacaaaattttttttttattacagaagtataaaggggggccagtcatggtgcctcacacctgtaatcccagcactttgggaggccgaggcaggaagatggcttgaacccaggagtttgaggccagcctgggcaacatagtgctaccctatctctattaaagaagaaaatttcaaaaaaagaaaaaaaaaaaaggtaaaactgcaacatggtccctacaaggtcacacttttgtaatcccagcactttgggaggctgaggcaggaggactgcttgagcccaggagtttgaggccagcctgggcaacatgacaaaaccccatctttacaaaaaaaaaaaaaaaaattagccaggcgtggtggtgtgcacctgtagttccagctactcaggaggctgaggaaggagggtcactggagcccaggaggtcaaggctgcagtgagccatgatcacaccactgcactccagcctgggaaacagtgagatcctgtctcaaaaaaagaagaggaaagaaaaaaactaaaaataagtcaagaccctgtctccaaatccgggcatattcagaggtactgagggttaggacttcaacacaggaaggtgtgggaaaagggcgcggattcagcccctgatggctgcttcaggtcatgtccataatacactgaaatgatatggaaatctttttcttttttgttttctgaaacggagtcttgctctgtcgccaaggctggagtgcaatggcacaatcttggctcactgcaacctctgccccccaggttcaagtgattctccagcttcagtctcccaagtagctgggactaaaggcgtgtgccaccacgcctggctaatttttgtatttttaataaagacggggtttcaccatgttggccaggctgttcttgaacgcctgaccttaggtgatccacccgcctcagcctcccacagtgctgggattacaggcgtgagccactgcacctggcccatttttccaaatatttttgatcggcagttggttgaatccacagaggcagaacccatggatagggagggtgggctaattaaatccagccatctttgatgttttgccgactcgaaaagccacagcaccacacagtttttgtgtatgttgttagaaaggtatgtttgtcatggtgagcgggacagaacatactgtatttaactttagcgagcttggttggtaatgttaaaatatgtagacatatggtaggcaggcttccatctgtacttctgccctgggcctcccaaatgtaaagactgattagttacataagcagaacacgcatctttaaaaaaagactgtttacttgtttgaaactgtcccgattcattcacctttttcccattttccttactacataagcggaatgtgcttctaaaagaagaataattgtttacttgtttgaaaatatcacaattcattcacctgttttccttaattacataagcagaatatacttctacagaaaagactgtttactttgaaaacatcatgattcattcacctattatccgattggtggacatttatactatgtgttagttatctcctgctaagtaatagattaaccttgcaaaacaacgaggctttaaacactgtgtctgtggatcaggaatttgggacgggcttcgggcttctggcttggggtcttttatgaggttgccaatgagaggtcagcggcgggcagcaggatctgcttccaagatgccttcctgccagggttggcaagttggtgctgactgttggtggcagtccttgttcctcccaggcaggcctttcctcacacggcttgagtgtcctcacaacatggcggccagcttcctccagagcaagggatatgagggagagcaggggagagggcggcacacacagcaggtgaaagttgcccttgttatgatgcagcttcaggaatcatttcatagagccgggggcaggggggtggctcacacctgtaatcccaactactcgggaggcagaggcaggaggatcgcttaagcccaggggttctagactagcctggccaacatggtgaaagcccatctctactaaaaacacaaaaattagctaggtgtggtggcacgtgcctgtaatcccagctactcaggaggctgaagcagtagaatcacttgaacccgggaggcagaggttgcagtgagctgagattgcactactgcactccagcctgggcaacagagcgagactccttctcaaaagaaaaaaaaaagtattttttgaaaataagaatatttgtaaaaaagaatcatatagcataacttctgccacattccattaattagaagcgaatcaccgaatccgacctgcacacacggggagaggctcaggcctcaccttttgaaggaaggcatagggaacaatttgcagacgtatttctagactgcctcacgttgtttccaatctttcgccattaaagcaatgctccaaggcttattctagagtggcttcttgtcctgcctgagccctacaccacccacaaggcactaagagtcaacggcaaagaggccgggagagctgatttagaatcatcaggctccactcctggagccgggaccaccctctcctgagacatacaggagaggggcggagtccaaaccaagctggccagaagacaggacaggatggagactgggaggacacccacaggccctctctttggttttgtacaatctacagagctcaacaagagggtatgatcggcccaagatatagtgcaggggcagggaaatccaagtacggttgcagctctagagccctttggactgagacctgctgcctcttttgtataaaaagctttcatggctgggcacagtggctcacgcctgtaatcccagtactttgggaggccgaggcaggtggatcacctgatgtcaggagttcgagaccagcctggccaacatggtgaaaccccgtctctgctaaaaatgcaaaaattagccaggcatggtggcgggcgcccgtaatcccagctacttgggaggctgaggcaggaggatcgcttgaatgggggaggtggaggttgcagtgacccaagactgtgccattgcactccaggctgggcaataagagcgaaactccatctcggaaaaaagctttcatggccaggtgtggtgtctcacacctgtaatcccagcactctgggaggccaagatgggaggatctcttgagcccaagagtttaagaccagcctgggcaacatagcaagatcccatctctacaaaacagaaaaattagccaggcatggtggtgcacctgcagtcccagctcctcaggaggctgaggcaggaggatttcttgaacctagtaggttgagatcacaccactgcactccagcctgggcaacagagcaagaccccatctcttaaaaacacaaagtgttaggctgggcgcggtggctcacgcctgtaatcccagcactttgggaggctgaggtgggcggatcacgaggtcaggagatcgagaccatcctggctaacacggtgaaaccccgtctccactaaaaatacaaaaaaaaattagccaggtgtggtggcgggcacctgtagtcccagctactcaggaggctgaggcaggagaatggcatgaaccccggaggcggagcttgcagtgagccgagatcacaccactgcactccagcctggacaacaaagcgagactccgtctcaaaacaaaacaaaacaaaacaaaacaaaaaccaaacaaacaaaaacacaaagcgttcagtactagatagtaaatcgtgagtagctttctggggaggaagctccattcttctctggcttccctgggtcctgagaccttgcccctccaacctggaggcccaggcgtgctgagcagcaccagcagagggctgtgggggcaagtgaacctcaggtggaaggctgagcagagtccttcagcccaggaccccaaggaaggagcaggaacctgtggggctttctctatctgctcctgctgtgcctccgcacacagctttgtctccacctggtggacaccccacctaagaggacagtggaggcggctggttggtgaactggctccatggcagagatcagacagcccatgcagcagagggcagagctttccaactcaggcccttctgacatttgggacaacattgttctctggggtggggccgttctgggccctgcagcgtgctgagcagcgtccccagcctccacccactccatgccaggagctcccccaaatcgtgacaatgacaaatgttcccagaccttgaccagttaagaactgatggtctaggacaagctcaatgccagggcgtagccttgtgcaggtggacagagccaaaggctgcttcctgcctggttcagcccatactctggaaggatccccaggatgttgtaggctggcctctgacttggagtcaggcttgagtcagcaccatgaagacagtgaatgaaaaagaacacgctcttcttgtagacaaccctgaacagcaatgctcaggcacgctacagtttggaatccactgagccagggcgcagggaaaatggatgtgcgaccaacatgcagatggctggacgtccgctggctgagggcaggtctcagcatccctgctggcctgcagggcaactcccactggtttcagtgttacaccctgtgaacgtcacagctgtgagcagactgaggacctgtgagggatacagggtcagggtgacatcaggcaagatacccttgacctcgccgcaggtccccaccctgtcccgccactctgctgtctgatggcaggaatggagtgcctctcctacacagataacagagacgcgggggcagaggcagcgaaacccaggcaccctctgggagaaggaggggcatgccaactgctctgaagacccaggaggctcccccagaggctggaaaagccccggggaagggtgcctgggatttcaaagaggaggggctcgctgagaggagcgtgggagaaatgaggagtgctggtggggcgactgtcctgggtgctgagggacagaggttatcagggtgaggggtgacgggaggcagctcagggctctccagtgccaggtagaacctgggatttatcctcagccatgaggagccacctgggcatctcatgacaagctttggcctgaattacgtccccctgcccccaattcttatgttgaagccctaacccccatgtgactgtatttggagatgaggccttcagggagggaatgaaggttatatgacgtcatcaggtggggactgatctgagcagaactggggtccttataagaaaaggaagaggccgggcacagtggctcacacctctaatcccagcactttgggaggctgaggcaggaggatcacttgagcccaggagttagacatcagcctgggcaagatactgggatcccatctctacagaaaaacaacaacaacaacaacaacaacaacaaaacaaacacacacaaaaaaaccacactttgcgcctgtggatccttgggaggctgaggtgggaggctcgattaagctcaggagattgaggctgcagtgagctgtgatctcaccactgcactgcaacctggatgacagggcagtcttttcaaaaaaaaaaaaaaaaaaaaaaagagacaccagcagtgcacatggacagagaaaaagccacaggaggacactgtgaggaggtggccatctgaaagccaaggagagagccctcaccagaaaccaccccctgctggcacctagatctcacacttctggcctccagaacagggaaaaaatacattttgtttaagcctcagtctgtggtattgttagggaagccccagccgaccaagacaggtggagacggttagagaggggagcagttagagggaaggcccattaaggacacgagacacacaggggccagaactagagggggtgatggacagggggacagaacacatgcgccatcatgtcaccggcaggaaagcacagtcaaagccagctctcagcagtgtagggctttacaaacacctaaaacagggcctgggaacagccaagagtaatatgtgtttggtgactgtgaccacacagtgaccatgactcaggaagggaacacttggcctgcctcatctcaagtcattgcttgtgaccccagaagccaccaaaacatgcaaatgcatgcacacacacgtgcatgcacacactgctgttccattccactaagcatgcttacacgaggaagtagagcatgggctttgtctccaatggggcagcccacatcttcatgggtctcacacccactctcaggggagaccatggcctggcagagcccagaatttaggggaggaagggaggggacagaagggtttttaagatggagtcagctatgtatggccaaatgcggcctgcctgtttttgtacagtcccaagctaagaatggtttttataattttaagtgactggaaaaagttaaaagggtaataatacttcatggcatgtgcaaaattacatgaaattcacatttcagtgtccaaaaaaataaagttttattggcacacagccaagcccactggatgacacattgtccacggctcatcttgcaatacaatagcagggttcactaatgtgacagacatggtgtggctcacaaagccaaagatatttactatgtggctttttacagaaaaggtccgctgacctctgactcaaagcaacaatcatttatttcacttgtgattctgcaggcggggatcagctgggcagctctcctggccaggcggggctcagctgggtgcctcttctggccaaggcggtgctcagctgggtggctcttctggccaaggcggggctcagctgggtggctcttctggcccaggcggggctcagctgggtggctctcctggccaaggcggggctcagctgggtggcaatcctggcagaggtggggctcagctggatggctctcctggccagatggggctcagctgggtggctctcctggctgaggtggggttcagctgggtggcaatcctggtggaggtgggcctcagctgggtggctctcctgaccatggctgggcttctctgcccctggagggcagctacctgttggatggggcactgtgactcttctccttatatctcctcctccagcaggccagccttgggtccttcaccaggcagggtcccataagatggagcagatgcaggcaaggcctcttaagcttgggcacagggcagtcacagcgtcacttccactgcagccaactgtccaaggcagggcacaaggaagcccagatgcaagggccgggggagtggtctccacttctggactggaagagtagcaaggacatggtgggaagggcatggatataagggtggatgaaggatgaaggcattttggcaacaatctgccacattgtggtttcaggagctgagccagcaaaaacacagctcctgggaagaacaccccacagcatgactcatccagacaccaaaaccaaggcagcccagggcagtggttctcaaagagggcaggttttgcccccaggagacactgggtgatgtctgaggacatctgtggttgtcaccacttgggggagctcctggcatggagtgggtggaggccagggacgctgttcagcaccctgcagtgcccagaatgacttcactgcagagaataatccagcctcaaatgtcaaaagtgctgctgttggccaggtgcagtggctcacctgtaatcccagcacttcgggaggatcacttgagcccaggagttggagaccagcctgggcaatacagtgagaccccatctcttaaaaactgctgctgttgagaaactcagatctgggaaggacaggctggggtccctggggctggggactagggattagagcctagctctgcagatggtcggcagccaacattgctgcttctgccaggtctcagatgcgacagggagaggcccacagccctccccgggttcccagcgtgggcggtcacgctgactcccccttgccttctcacagtttagagtcagatgaaagctgtggcctcccgccctgccctgatcccctgaaaatgacaaagacaggtgtgcctgtagttaccttaggtttcccagaccccgggttgagaatccctgctgtcacaggtggatcaaaaagcatttgttgaggttaaatggaaaattttgtattatatatattttgccaccaaaaaaaaaaattacactctagcacatgctgcatggatgaaccttgaggacatcacaccccgtgagagaagccagacacaaaaggccatacaatatgtaattccatttctacagaatgtccaggagaggccaatccacagaggcaggaaggggatttgtgggtgccaggccctgaaggaggggttaaaagtaatggctaatggagatggagtttccttttgggccgataggaatgttctggaatttgaggtaacagtcacacaattctgttaatatactaaaaaccaggctgggtgtggtggctcacacctgttaatcccagcactttgggaggccaaggcaggaggatagcttgagcccaggagcacagttcaagaccagcctgggcaacacagtgagacccccgcctctacaaagtctctacaaactacaaaaattggccaggcacagtggtgtgtgcctgtagtcccagctacttgggaggcagaggtgggaggattgcttaagccctggagtttgaggctgcagtgagctttgatcacaccactgcactccagcctgggcaacagagcgagaccctgtctcaaaaaaaccactgtgccctgacacaggcagggcacagtggcctacgcctgtaatcccagcactttgggaggccgaggtgggcagatcacttgaggtcagggttcaagaccagcctggccaacatggtgaaaccccatctctataaaaatacaaaaaaaatgagccaggcatggtagcaggcttgtataatccccagctactccggaggctgaggtaggagaattgcttgaacctaggaggcggaagctgcagtgagttgagatcgcaccactgcactccaggctgggtgacagagcgagactgtctaaaaaaaaagtcttgttctttctaggcttttctagcaactaccacataacaggcgcttcacagccatctgcagagtctgattcagagacacctgtggtagctgagaccagcgatcatgtgaacacatcatctccggaccaaaaccaaaagtcgattattccaaacatggtcagagctcagattcctacatcccagagagaaaccactcagaggctgacatagatgacactagatggttagggcaggggtcttgatgtagagcatgtgcccgtaaactctgcaataaactcacaggacaggaagtagcccttttacattcttgcagagaaaaagagttgggcagaaaacaagagttcttctaaactacatcattaagaggttttttgttttaagagacagggtctcgctctgtcaccctggctagagtacagtgatgcaatcatagctcactgcagcctctaactcctgggctcaagtgatccacctcagcatcccaagtagctgagactacaggtgtgcaccaccacacccagataatttttaaattttttgtaaagtcagggccttgctttgttgcccaggctggtcttgaactgctggcctcaagcaatcttcctgcctcagcctcccaaagtgctgggattacagatgtgagccactgtgcccagctaattttttaaatttttggtagagatggggtctcactatgtcgcccaggctggtctcgaactcctgggctcaagcaatcctccacccttggcctcccaaagtgctgggattactggcataagccaacgtgcccagccaagtttttctttttttaatgtgaattttttacttctactttaaatcccaacttagcatggaaaatcatttgcattttcagaacaaaggaggccatcttctggctaagctgaaaaaaaaagtcattagaggccttctgaggcaccattttaaagatgatattgcttttgcgggttgcactatgagaaattctgtgtgtacaaaatacctgacagaaagtgaaagcagtcccgggcgatccggcggcagattcattgagtcattggataaatacttcctgggtgctagtggggaccagctgctgtcatgggcgctgtcacagcagcggggaataaccagaccaaagtcccgtcctccaggagggtgctgcgcgatagtccagggagacacggggtcagcaaaataattcaacgcgatctgatggttctcatgccgccgggaaggacgcggcaagggggtgtgagcagggggttgcactttctcacgggctggtcatggcgggcctggtgggtgaggaggagggtgaagacacaaagttggggaaacagggcagcgcatttgagcagagggaattgcatgggaagggcctgagggtgaagtgcccggaacctggattggtccagaaggcagcgtgactagagcggaaggaatgaggggagatggggtcagagaataaagggtgtggaacagggggcagaggacaccatgatggatgtcacaggccatcgtaggggctccagcttgtcccctgagaccccacgggggtttccagcggaggagggacatgggctacgttgtgatggggcctctttggcgctgtgcgcggatggaaatgggggcgagagcagaaggaagcgtgaaggtccaaaatacagacgaggcaggctggtgcgcggtggaggcggtgcgcgtgcaggggcgtgcgctcaaggtcagaagaaggaaaggaggccagcctggcttcccattttgggatctgcacgaaggactgccggcggccctgcctgccgcggggaagccagcaggatgaaggggttttggagaagcgtgcaggcgcttggacttggatatgatcagcctgagatgccagtcagacatccacagagcatgctgcatgggccgctgtatgcaggggccgagactagagctccagggagaggcctgcgctggagtcagaaactgggtgtcatcgatagttaatatttttttaagattgagatatagtccacactgtaacatcccccctttaaagtgcacggttcggtggcatctagtacatttacaaggctgtgcaaacatcacctctacctaatttcagaatgtttccaccaccccaaaaagaaacctgtccccatcaacattctctccatccctccccagcccccggaaccactaatccatttcctgtctctatggattcacctgtaaaatgggaacacctaatttggtatggtgatggtgtgatgattaaacaagaactcacaggctacagggcccagcatgtggcaggagcttacgatgtagcccagggtagccagagtttcctttatttttggagacggagtcttgctctgtcgcccaggctggagtgcaatggcgccatctcggctcactgcaacctccacctccctggttcaagcgattctcctgcctcagcctccccagtagctgggaatataggcacctgccaccacgcctggctaattttgtatttttagtggagatggggtttcaccatgttggccaggctggctcgaactcctcacctcaagtgatccgtccacctcggccttccaaagtgctggattacaggcaggagtcactgcacctggccccagagtttccaattttaagcgatgctaggaaccagaggttttgtgaaatcttcttttttttttttttttttttttttgagacggagtctcactctatcgcccaggctggagtgcagtggcacagtctcgactcactgcaacctctgcctcctgggctcaagcgattctcctgcctcagcctcccgagtacctgggactacaggcgcaccccaccacgcccagcggaatctcccacttttaaatgctggcaactaattcaaataaagcaagcaaaaagctcactgcacaggcgtgagaaccaaacacggcctgcaggctgtcaattttcaaagtctgacccacactgaggaggtgagagcgatagttgagaaacaggtataaaaagtcacaaactggccgggtgtggtggctcacacctgtgatcccagcactttgggaggctgaggtgggcggatcacttgaggccagcagttcgagaccagcctggccaacatggtgtatacaaaaaaaaaaaaaaaagccgggcatggtggtgcatgcctgtagtcccagctactcaggaggcactgaggtatgagaatcacttgaacccaggaggcggaggttgctgtgagccgagattgcgccactgcactgcagcctgggcaatgaagcgagaccctgtctcaaaaaaaaaaaaaaaaaaaagtcatgaatttattctcagtaaagcctgcccataaccaatgagcccaggctatttgctgctgctgctgctgtttggagtcacctgttgctggaaggaactgtgccactgtactacaccagagacagctgccatctccatgacaacaagcacgcgctggtgctgcctgcctgggaggggagaagagcacaggtgggaaacggggagcccaggctaacatggacttacaaacagtggtgacacacgtctacaagtcctgcccggcactcccaccttcaggccccaggctaatgtcttttgatggctttttggtcggagaatttgttttgggaagtcaagctttttcaggtgcatccttctaaactgaattttgggatgcaaagctagcgagccccactgatctcattttgttcacacggccaccaaactcaaggggacgtcaaggcctaggggatggaatgggcccatctgagctgcccacgtcacctggcccagagctctttctgtagggccatgctcttgcttgctccgaagagacggagcaggcttaggtgtggtccacacttcagagggacacgggtgggatctgcagatagaggcaggtggcgaaatgtcttagggacagccaggaagatgggtcattctctatttgcatataatgctaatttctgctgaacactgcattgaataactcaatgggaacacacacacacaaaaccccccaaaacatttagagtccaaggaaaaactcaagtggaaataaagattttcctggaatcacaggctgagaaatgtcatcattctttctaaaaacaaggactcagtcaggtgcagtggctcacgcctataatcccagtgctttgggaggccaaggcaggcggatcacctgaggtcaggagttcaagaccagcctggacaacatggtgaaacccagtctctactaaaaatacaaaaatcaaccgggcatggtggtgcatgcctgaaatcccagctacttgggaggctgaggcaggagaatcacttgaacctgggaggcagaggttgcagtgagctgagattgcaccactgtactccagcctgggcgacagagtgagactccgtctcaaaaagaaaaaactaaaataattaaaaacaaggactctttcttcccgaacacagctcatcacctatttctctatcacccccatggcagatggagatgaaggctgaggccacccagctggaaatggaaatgtcacagggccctgtgatggttaatactgagtgtcaacttgactggattgaaggatgcaaaatattgtcctgggtgtgtctgtgagggtgttgccaaaggagagtgacatttgagccggtggacagggagaggcagacccaccctcactctgggtgggcaccatctaatcagctgccagctcggccaggataaaagcaggcagaggaacgtggaaggactggactggctgagtctacaggccttcatctttctcccatgctgggtgcctcctgccctcgaacatcagactccaagttcttcagcttttggactcttgggcttacaccagcagttggccaggggctctcgggcctttggccacagactgacggctgtgctgtcggcttcccgacttttgaggtttggggactcggactgatccacccctggcttccttgtgcctcagcttgcagacggcctatcgtgggactttaccttgtgaccgtgtgagtcacttctcctggataaggtccctttcatggagacctctatcctgtgagtcctgtccctctagagaccctggctcatccagccactgacttccgtgccccgggaaccgctggagaacacctgcactcccgcgttctgaccttggcgcggtgggtctgcgactgcgtgcagcgtgagccacacccaggtggagggcgcagggcctcaggggccagagagacaacgtgccctgccacaccagaggctaatgcgtccagtcaagtccttcatcagggagagagttttcaagtctgttttaccagcagtaagacgacatttcaatcgctgtgtgtacacacaacacacacacacccagaatttcattttgtggcacttctgttcacaggggttttatattcaaaatgcatcttacacattcatacccgtaacagtcctgattttgtaaccagtttttttctttttctttttttctgaccatgaaacccttaggtgcagtctccatgtgaaatgcccatttcagatccagaaacccccaaaatgtcccaacgtattggaaaggagttctgttaactcaatcctcgggaagataccaaaaggacttttttgctttttgagtcagggtcttgctctgtcgcccaggctggagtgcagtagcacaatcatagttcactgtggcctcaaactcctgggttcaagtgaccctcccgcctcatcctcccaagtagctggaactacaggtgtgcaccaccatgcctggctaatttttttttttttttttttcagagatggggggggtctcactatgttgctcaggctggtctcgaactcctgggctcaagtgatcctcctgcctcggcctcccaaagtgctgggataacaggcgtgagccactgcacccggcccgaaaggattttatcaccccaggctcactttcaaaccgtcttcttttgaatggagtcaagaggccagctccaaaccaggacccgcctggttcctcaggatggagccaccatagggcggcaggttcttgaggtgggaattggattccagagcctgggcgtcgagtttcccgagcctcgggggcgagccaggttatgcggcagtgggactgatgggcttgtcctctgccctgctgagaaggaacatggtcccacgtggagctggctgcatggtgagccccaccaggcaggtgcttgagaacaccaacttgacgataccatgctgatcacgctagagaaggcattagctacgtgccctcccagacgcaggacaagcgacagaatttccaacagcatcggctcactacggcaacacctttttactcttgtgcaccaaactggccgacatctcaggaacaaggaggggtcatctcctgttccagccctctcctgctgctttaagaaacggaacgacctgcagagccctgtctgtgctggctcatgagccgctcgtgtcaagggcaggacaagatggcaaaccccaggttctcatgagcaaccacaaccggcctcgaaccaccaacctggactcaaccaacgacactcaaaacaacagacaccaccggctctttatacatccatggcaagggcctggggacattacaggtcactctgctcccaaggggcagagctcaccacagacttcacctcctgcggcaggactggccttcccagatccacaatgccgcggaagcagagccatgccgcctctccactctccgccaaccgcgacaagtaaacgactcacaataggtccatttaaaaaggcaaatggaacttaccttaggggaaaaaaacctgcccaaagcaaaaggaacatatccaccaaaaaaagaagtgtcattcccccaaatatgtacaaattaactttctagctaaaagaaatctggcaactttaaaattaaagttgagcagagcgcggtggctcacatctgtaatcccagcactttgggaggccgaggcaggtggatcacttaagctcaggagtttgagaccagcctggccgatggcaaaaccccgtctctacaaaaaaatacaacatttagcctggtgtggtggtgtttacctgaaatcccaactacttaggaggccgaggagggaggactgcttgaggccaggaggttgaggctgcattaagttatgaccacaccactgtgctccagcctgggtgacagagtgagaccctatctcaaaaaataattgaaatagggctgggcacggtggctcacgcctgtaatcccagcactttgggaggccaaggcaggtggatcacctgagatcaggggtttgagaccagcccggccaacatggtgaaacctcgtctctattaaaaatacaaaaattggctgggcgtggtggtgcatgcctgtagtcccagctgctagggaggctgaggcaggaggattgcttaaactcgtgagccagacgttgcagtgagccgagatcgcgccattgcactccagcctgggcaacagagtgagaccctgtctcaaaaataataataataaaatacaaagacaatgaacacagggtttacaagtccctttctacgtgttttccttatttttctagggctgcctagttatttatctgatcagggcctttgtcccatgacccccagaaccccaggaaagaacaccaatattcattaccctcaggtgaaaagactgttttccagggccatttgaaaatgcttttaaatctgatgtatttgttctgatcattctaaatacacacgttggtagacccacacaagagacaaatacaaaataaaactattaaaaatccagaaacagagaatatgtttaggagagaaaaaagtctcctaggaatttacttctgccccagtatgtatgaactaacttttggttcttttcttttgagatggagtctcactcggttgcccaggctggagtgcaatggcgcaatctcagctcactgcaacctccacctcccggattcaagcgattctcctgcctcagcctcccgagtagctgggaccacaggcacgtgccaccacacccaggtaatttttggattttcaattgagatggggtttcaccatgttggccaggctggtctggaactcttgacctcaggtgatctgactgcctcagcctccccaaatgctgggattacaagtgtgagccaccgtgcctggcctaacttttggttctaaaacaagtaagatgaaaaatcaaaatccacacttcaaaaacatccaatctacctaattccttgtataggagctcagaccgcaagtcctgtcatttgaaaaggtttcctgaaagtacacttcaacccattttcacgtgcagccggcagctgcctctcggattctcttctaaggagttcagcccctaacacgtatttcagccttgctgagaagggcgtgaaaaagaccgcagcaacatgggaggggcaagttcccccctcgctcctccagggtcgtgctccctggaaagaatgggtgcagcagaggcacagttacttattaggatgtgcaaacagctggaggggcccacggtctcactttcctggggctttttggacctggtggtaggagtccatttacaggtatgcgccctggcccccaaggtggcgacatcggactctccagggcagcctgtgttccttggacctaagctcaaaggacggggttggccttggtgggtggggtttccactggaaggacctggaggcctgccggagggcgagcgtggcgtctgggctgggtatgaccaggtcggttctgaagccggttgcagccacacctggcaggcaggggctcccatcaggggtattaacaggttctgtcactggcactggggctgccgagcctgttctcatggtcagcatgggctccgggcctttttcaagctacctgttgcccgggagacatttttgagagatacgggttgggtcaccgttactttcccagtgacacggggccatgtgctgtctcaatgtccccactccggggaggggctcttgtttttttattgttttttgagacagggtctctcgctgtcgcccaggctgcagtgcagtggtgcgatcatagctcaatgtagcttcaacttcctggcctcaagcaatcctccctcctcggcctcccaaagtgctgggactgcaggtgtgcactgccatgcctggccatgtgttttttaatgtctaaaggatgtagccctaaaccactatctgaccgggccctgaactagcagggcaggggcaggtgacagcgtaaaggatggcaataacacagtctctaccacaggcgcaacctctaagctgacgtggtcagggctgggttccacaccacggctgcctctctaggctccagcagccctgactgtgagtgaggcactggcctgggcccattcctagccgggccgaccactgggcccccacgtcagtccagtgactgcccccaagcctcactttcctcatcagcaaaatgggcttcacaacacctaccccaaggatcacgtgagggctcagtcagtatcaggtgcccgggactcacctcacacagagaatcaataaccagcaacgagcatcctgcccatcactaacagagtgtgatggcgttccaaccccgcctcccacttcctgaaactctccaggggaaggagctcagcttataatgtatgctaatagtgtcagaatctaattgcagggaggaagtgcctgtaatcccagcactttaggagggaaaggcaggagatctcttgaggccggttcaagaccagcctgggcaaaatagcaagaccctatctctacaaaaataaatatcgccaggcatggtggtgcgcacctgtcgtcccagccactccaggaagctgaggggggaagactgcctgagcccagaagttagaggctgcagtgagccaagactgctacggcactccagcctgggcaacagagtgagatcctgtctcacaaacaaacaaacaaacaaacaaacaaacaaacagaggttctctggacaggacatcaagtattacaccaaaatccagtagtcttctaactcagatttaacaagaatgcaaaggcacagctagccgactgcgtaatactggtggaactgtgacaaactgctaaacaaagagaaaggtaacggcagaggcctctggcctgtcgcttcccactactctgcacttccaacacaccactttgagctctacatactttcatgactagtgtgacttaacatgtacagaccctgttggagctcctcagctattctcagctaaaaaactgtgctcaatgctaatctttcttttcttttctctcttctcttctcttttctttttttctctctttttcttgagacagactcccgctctgtcacccaggctgaagtgcagtggtgccatctcagctcactgtgacctccacctcccgggttcaagcaattctcctgcctcagcctcccaagtagctaggattacaggcatgcgtcaccacagctggctatttttttgtatgtttagtagagattgggtttcaccatgttggccaggctggtctcgaactcctgacctcaggtgatctacccgcctcggcctcccaaagtgctgggattacaggtgtgagccaccgtgcccggcctgcgctcagtgctaattaaaagcactgctgcattcagttttccacatgggattaatgtttcattctgaagacctgcagcactaattcaacttctaaaaaaaaatatgagattcataagaccatataaaataaaataaagataatcaacattatcaacagctaactgtaaacttttcttatgccttcaagagtgaatgtgggtccaattcttactgaccaacaattaagcagttcagataccaaccctatttatggatgaaaatgttaaggaaattcctacccagggctacggttatcatttttttgttcatttgttttagagacagtgtcttgctctgttgcccaggctggagtccagtgttgcaatcccaactcactacagcctcaaactcctgggctcaggtgatcctcctacctcagcctcccaagcagctggggactataggtgcacaccaccacatctagctaattgttaatttttttatagagatggggggaaaggtctcatcattttgcccaggctaatgtcaaactcctgggctcaagtgatcctcctgtcttggccttcgaaagtgctggagcgacaggcatgagccaccatgcctggcctggttatcaattttataagctaagaaaacctacccaaaactcctaaaaaatgaattgctgcctttgttttggcaattcttgaaacaggtgttgtaaatactgctgtccaaatgctgccataaaattggtacacaaaatctggtatctcatcagttttctcatggcaggttatataaaccataggtacttttttgtttgtttgagacagtctcaccctgtcgcccaggctggagtgcagtaacgtgatgatctcagctcacagcaacctccacctcccgcgttcaagagattctcctgcctcagcctcccgagtaactgggattacaggcgcgcgacaccacgcccggctaatttttgtatttttaggagagacagggtttcaccatgttggccaggctggtctcgaactcctgacctcaagcgatccgcttgcctcggcctcccaaagtgctgggtttacaggctgagtcaccgcgcctggccaaaacatacgtactttaaaagcagccaaagtttccaaacaaaagtcatttcccacaagaaagaatgtctagttaacctaaagtcattcaaataatgcctatcatcttgtttcaaggttttgtgagaatgaaatgtattttgctatgattcctgtgttatttttagttaatagcttactattttcttaaggaagaacacattctctctgcggcaattctaaggacggactaactcaacaactcaacaccgggttgcgtgtatactgtatcacctaagccatcagaacacagaaggtagctgtgctaaaatgggttgcgtgtatactgtatcacctaagccatcagaacacagaaggtagctgtgctaaaatgtataagcacgttaattcaaatcaatgacagaagcctctactgaagcttagcaatcacctatttgaacaacataaacattcaatttctcctctggaaggtaattttaatagcaagcataatattcaagtgattttccacgtctgatggaagaatacaatggagaaagaaagaagagaaagagaaaagaaggaagagctagcaggcagaggggtggagtgtgtccagaagtttgtactagcctggatcgctagccaagtccagccgctttaactgagccctggcaatcaaaacaccactgaggatgaaggaagcaaaagaaaagatcaaataaaaattaaatgctccattctgggaaatcagcaggtcatagattctttccctaataggaaatccattactagtcaaatactccaccagagaaaccactccgagtgcaggaaacagatgcactcctcattcccacagccctggtttccaagccctgggtggtttctctttgtgattccattagaaagggcacagcaatatcacagcactggtggaagggtcggcactgccgctccaccgcgggaagctgaaacaccagcctggatctctcttccatgtgctgaaatgcagtaggaacaccgcggggggcaaagacccccctgagctcagcagaggcccctctatgaggtgcccaaggggtggtttgtatctgtgggggctcagcagggactgtgagaaacaaggttatagcaagctaccagctggaaactaacacaagggtgacacgcggaaatgatcaactgttggggggggaatctggtcccctcagagatgccagccctggctcccggactgggactccagtcttgggggcagatggacgggctgaagatagcagagatgctccgaggagcaggcctgggagaacagtgtagagtgtgtgtttgtacacttggggcacaaacttaccccgtgtgtgtccctaccctctgagcccttctgcccctggccagttcccagtgtgtccccatcccctgccatctctcctccaggatcctttctctccctcccctcccaaacgaccacatatttaagacctagaaaaggatcttaaatatcacaacactcagggccctttctccctcctcactgtcccagcagggtcccagttccctggaaacccaggtgcccaccctcttatttgacctcaggacctcctcccacataatactggcttcccgccaagtctctgtcccccttccccagtcaggcctcagttccccaccaacctcggtttccgcccctccctggggtaacctcccaggtctctgtcttctctcctccaccccacatcaggggtcaggttcccacccctactccacaccccaccccaggtctctgcccctgcctgctaggtaccctcccaggtctctgccttctctcctacccccaccatcaggggtcagtgccctccacactcgaatgttgctgccccctgcccagtcgggaaacttcccaggtctctgccttctcctcctccagcaatcggggattaacgcccctctgcccttcccctcctcctgcccagccagacaccctcccaggtctgaattctctccccctaccagcaatcggggtcagctccgctctagctctccccctgtccagccagacaccctcccaggtttctgtcttctctcttacccccatcaggggccaattcctcacccctcgactgtggcttcctcctgcccagccaggaaccctcgctgatctctgttttctcctcccctacaagtaatcgggggtcagctaccctctgtccatccccctgcccggccaggcaccctcccaggtctgtgtcttctcctccccccgcaatcgggggtcaatgcccctctgcccttcccctcctcctgcccagccagacaccctcctaggtctgtgtcttctcttcccctaccagcaatcaggggtcagctcccctctgcccatccccacccactccccggccaggcacctcccaggtctcctccctgcattgggtcagttccgtcccctcccctcctcggtcagaccacccaccccccgcccgggtctgtcccctctcgctgccctcctcgtggcgcccccatcaggggctgacccccccgaccccgcacaggcccaggcccaaacccaggccccctcccacttcaggagccccctcccgctcccgccgacagacaccgttggctgcagagacgtctcagccggagccccggagcccgcatcccgcccggtgcctaacctgaggccgccccgcctgcttctcccggcgccgcggcttccctcaggccggggttccaggttggggctgggactggggccgggccgggcgcacgcggcgggagaaggggtaggcggggtcccggccaggctgcaggggccgggactggcgggggctggcgcggcggggcagttacctgtactgcgggccgccgccctgcgcgaagtcgaaatactgactcgtcgccatcttggcgtcttccccgagcctggcggacccgcgacgtcacccgccccgcccccgagccgcgtgccgctcgcgcctggccacgcgccccaagctccgccccctgcgcgaagccctcaccttctcgcttccttctcttaggctagggagacaccgccccgcgaccacacctgccccgaggccccgcctcctacgcagagccccgccctcctcttaaccactcaaatgtggaggtctctgctcaagccccgcccatgctagaagccctgcctctttctcggagccccacattccctttaaccactcagatgtggtggtatctgatcaagtcccgcccatgctacaagccccgcctcttactcagagccctgccttccctttacccactcagatgtgatctctgctcaacccccacccatgccacaagccccgcctttttttggaaccgtaccttccctttaaccattcaggtgtggaggtctctgctcaagccccacccatgccacaagccccgcctctttctcggagccccgccttccctttacctgctcagatatggtctctgcacaagccctacctctgtctccgagccccaccttctctttaaccactcagatgtggaggtctctgctcaagccccaccaccaccacagccagctaatttttaaattttttgtagagacagtgtcttgctatgttgcccaggctgatgttgaactcctggcctcaaataatcttgccttggcctccaaaagtgctgggattacagacgtgagccactgcatctagcctcagaatgactcttcagaaggcccccatggtctctgcctcctgtgttcacaacgtgatataaataaatgataggccgggcacagtggctcacgtctgtaatcccaacattttgagaggcggaggcaggaggatcttgagccctaggactttgagactagcctgggcaacatagcaagaccctgtttctacaatttttttttaattagctggtcatggtggtacatgcctgtggtcccagctactcaggaggctaaggtgggaggatcacttgagcctgggctgtcaaggctgcagtgatctgtgactgtaccactgcactccagagtgagaccctgtctcaaaaaagagaaaagaaagaaagggctgggcgtggtggctcacgcctgtaatcccagcactttgggaaggcgaggtgggcagctcacccaaggtcaggagttcaagagcagcctagccaacatggcaaaaccctgtctctactaaaaatacaaaaaaaaaaattagccaggcgtggtggggcacacctgtaatcccagctactcgggaggctgaggcaggagaattacctaacccaggaggtggaggatgcagcgagccgagatcacaccactgtactccagcctgggcaacagagcaatacaccgtctcaaaaaaataaaaaaataaaaaataaaaaaataaataaataaataataaaagaggagagggagaggagcagggagggagggaagggaaggaaagaagagagagagagagagagagagaaagaattgaatgaataaacaaataaatggaggcaaacagacaaatctcttatgcagaagaattcctaatttgtgtagctacactgcgcttaaggagatagagagtaactctacacctcttgagtgtgggttgtgcatagtgacttccttcccaagactgcagcctggaaggagggggagggagagtcacttgacagtattgaaacctgacaagcagcagcgtgtttggcggtcccgcggatccgtctcttgcttccacagtgtttggatggaacagatccgggaactcacttccagcctccgaccacccgctgatttcctctcttcttgcaacctccaggagcatcggctcagccatctcctgcttctcggaccaaccaacgccgtttttttggttagctccttcttgccgaccaaccatgagctcccagattcgtcagaattattccaccgcggtggaggcagccgtcaaccgcctggtcagtttgcacctgcgggcctcctacacctcctccctctgcgggtttttttttttttttttttgcttgttttttttttgagacggagtctggctctgtcgcccaggctggagtgcagtggtgcgatctctgctcactgcaagctccgcctcctaggttcacgccattctcccgcctcagcctcccgagtagctgggactacaggcgcccaccaccacgcctggctaatttttttgtatttttagtagagacggggtttcaccgtgttagccaggatggtctcgatctcccgacctcatgatccgcctgcctcggcctcccaaagtgctgggattacaggcgtgagccatcgtctgcgcttctatttcgatcaccaagatgtggctccggaatgcggggcttacttcttccatgaattggccaaggagaagcgcaagggtgttgagcgtctcctgaagatgcaaaaccagcgtggtggccctgctgtcttccaggacatcctgaagccaggtcaagatgagtggggtaaaaccctggaagccatggaagccgccatggccccggggaaaaatctcaaccagagtcttttggatcttcatgcactgggttccgcccctacagacccccatctctgtgacttcctggagagtcacttccgagatgaggaagtgggctgcacgcggtggctcacacctgtaatccctgcactttgggagaccgaggcaggcagatcacctgaggtcaggagtttgagaccagcctggccaacatggcgaaactccagttcttctaaaaatacaaaaattagccgggcgtggtgagctactcaagaggctgaggcatgagaatcgcttgaacccaagaggcaggggatgcagtgagccgagatcacgctactgcactccagcctggggaatagagtgaggctctccaaaaaaaaaagaagaagaagatgggtgaccacctgaccaacctccacaggctggccggcccggaagctggggggcccagaggctgggctgcatgagtatctcttagaaaagccgactctcaaacacggctaggaacctactgagcccagcgacttctgaagggccccacgtaaagtaacggggcttctgcctaagcctttccctccattcactaggcagcttttttgtttatttgtttgttggtttgttttgttttgttttgagaaggaatctcgctctgtcgctggagtgcaatagcacaatttcagctcactgcaacctccgcctcccaggctttggcgatcctccaacctcagcctcccgagtagctgggattactggcatgcgccaccacacccggctaatttttgtatttttagtagagacggggtttcaccatgttggccaggctggtatcaaactcctgagctcaggtgatccacccgcctcggtctcccaaagtgctgggattataggcgtgagccactgcgcctggctttgttatagcaccctgaacagactaagacgcccactttgaacactagattccaaaaagcatcatagaagtcttgggcttctgttagataggcatggtggcaggtgcctgtggtcccagctactcaggaggctgaggcgggaggatcacttgagcccaggaggcagaggttacagtgagccaagatctcaccactgcactccagcctgggtgacagagccagacccccgtctcaaaacaaacaaacaaacaaaaaacataaaaggggcctggcgcagtggctcatgcctgtaatcccagcactttgggaggctgaggcgggcggatcacctgaggtcacgagttcaagacgagcctggtcaacatggtgaaaccctgtctctactaaaaaatacaaaaattagccaggcaaggtggcgggtgactgtagtcccagctactcgggaggccaaggcaggagaattgcttgaacctgggaggcagatgttgcagtgagccgagatcgcgccactgcactccagcccaggtgacggagtgagactcagtctcaaaacaaaacaaaacaaacaaaaaaggaagtcttgggtcttgggcatctatgaacttttgctttgctgaagtctttcaaatcagttggctttttgacaatggagtattacgagagcattaaagtaagaagtgcattcagcagatacagggctactaattcttggacaggctccatggagagcccagggtgctgagggaagccacatttggtgatttagcggatggcactcttccatctgtaactccatgaccatgtgtggccaccaggaatggtctggtgggtctggccagtgcagctctccctgccatgccctggctaaagtccaacaaggtaattaattgcacacggcctctctccaagtccctgccgttctaattaggtaatgaaggctgtgtctctttacaaaggatctgttgtagtgttttctctgggttgcattttttctattatttactgcaaggattgtgctaaatgctttacatgcaaaatgtgatctagttcccacaacagccttcagaaggccgggcatggtggcttacacctgtaatcccagcactttgggaggccgaggttgggagttcaagaccagcctggctaacatagtgaaaccctgtctctattaaaaatacaaaaaaattagctgggcgtggtggtagttgcctataatcccagctactcaggaggctgaggcaggagaactgcttgaacctggagggcagaggttgcagtgagttgagatcacaccactgcactccagcctgggtgaaagagtgaaactctgtctcaaaacaaaaaaaaaaccaaaaaaaaaaaaaacagccttcagaagtagaaacaggcatagtggctcataccagtaaccccagctacttcggaggccaaggcaggaggattgcttgagcccaggagtttgagaccagtctgggcaacatagggagaccccatctctacaaaatacaaaaattagctggatgtggttgtgtgtgcctgtagtcctagccacttaggaggctgaggtgggaggatcgcttgagcccaggaggtggaggctgcagtgagccataagtgtaccactgcattccagtctgggtgacacagcaagacccagtctaaaaaaaaagaaagaaagaaaagaaaagaaaaaagaggccaggcgtggtggctcacacctataatcccagcactttgggaggccaaggcaggcagatcatgaggtcaggagatggagaccatcctggctaacacagtgaaaccccgtctctactaaaaatacaaaaaaattagcaaggcatggtggcacctgtagtcccagctactcgggaggctgaggcagaagaatggcatgaacccgggaggcggagcttgcagtgagccgagattgcaccactgcactccagcctgggcgacacagcaagactccgtcccccaaaaaaaaaaaaaaaagaagtagacacagtcgattctcattaattctgttctctaaagtcaataccaagctcactaatactgaccatcgctcctaagagaaacacgaggttgagttcctgtgagcctctagtcacagtgtttgcatcaaccatcaatacacgacctcggccagtgcagtggctcacgcctgtaatcccagcactttgagaggatgaggagggcggatcaactgaggtcaggagttcgagacccgcctgaccaacatctctactaaaaatacaaaattcgccaggagtggtggtgcatgcctgtaatctcagctactcaggaggctgaggcaggagaatcactttaacccaggacgtggaggttgcagtgagctgagattgcgtcattgcactccaacctgggcaataagagcgaaactccgtctcaaaaaaaaaaaaaaagaaaaaaaagaaagttcaaatgtctagccaaccgggattagttcagattgtgtgacccgaccccggccaatggggaaagggcacaggggcaggacttgcctcaggaataaaggctctcatgcccctttgttcaggtgcgctctcatgacgactggacaaagaaaaacacctctctgcgcagaagtaaaattgctttgctaaaatccctttgtttgtgtattcaatcttcttaggattttgagcgttattcccaacaaatagacatggttgattcattcacattgaactcatagcacttttactcatatctgaagttctctaacacactgcttttcttcttggagctttctttttttttttttttgagatggagtcttgctctgttgcccaggccagactgaagtggcgcgatcttggctcactgcaagctccgcctcccgggttcacgccattctcctgcctcagcctcccgagtagctgggaccacaggcgcccgccaccacgcccggctaattttttgtatttttagtagagacggggtattgccgtgttagccaggctggtctcgatgtcctgaccttgtgatccgcccacctcagcctcccaaagtgctgggattacaggcgtgagccaccgcgcccggcctctccttggagctttcttgcacttaggaagactagacagtgcttcagcatgaagcttggaagtcattttattttatggatttatttatttatttttgagacagagtcttgctctttcacccaggctggagtgcagtggcgcagtctcagctcactgcaacctccgcctccctggttcaagcaattctcctgcctcagcctcctgaatagctgggattgcaggcgcgtgccaccacgcccggctaatttttgtatttttagtacagacggggtttcaccatgttggccaggctggtcttgaacttctgacctcctgaccacccactttggcctcccaaagtgctgggattatacgcgtgagccacattgcctggcctgtatcaagcattcttttagggcagaatttttcttgctcagtaccgtggacattgggaccagattattctctggggcggagccatcctgggcactgcagggtgctgagcagcgtccctggcccccatccactccataacaggagtatcccccagtcgcaacaaacacaagtgtccccagaaatcgtccggtgtccgctgcgggcaggatcaccacccccccaggtgacagccactggtgtaggggttaaagatacagggtgacaggccgggattacacctgtaatcccagcactgagcccagcactcctggcctcaagtgatccacccgcctcagactcccaaagtgctgggattacaggtgtgagccactgcacccagcccacaagaaaattttctacaagctcaccttcagaaaagtttcaagatcctacaaaatctagcccttttgtgcatttccaaacgaattcctcagggatggccggcagaataatggcccctaaagatatccacacccactgggtgtggtatgtttgcctgggaaaaatagtgagaccccatctctacaaaaaattgtcaaattaaccaagtgtgatggcatacacctgtagtcccagctgccagggaggctgagataggaggatcacttgagcccaggaggttgaggctgcagtgagccatgatcacacccccgcactccagcctgggctacagagcaagaacctgtctcaaaaaaattaaattaaattaaaatttttccattttaaaattaaaataaaacgaaatgaaaacagacagaggccagctgcagtggctcacacctgtgatcacagcactttgggaggccaaggtaagcggatcacctgaggtcaggagtttgagaccagcctggccaacatggtgaaaccccgtctctactaaaaatacaaaaattagcctggcgtggtggtgggtgcctgtaatcccagctactcgggaggctgaggcagaaaaatcgcctgaacctgggaggtagaggttgcagtgagccgagatcgcaccagcctgggtgacagagcaagcctctgtctcaaagggaaaaaaaaacagggaaccaagcttaggtcacacgctgtggctcctcggtggtggctgtagcaccatggacagctcccaggctttggtggactggggagaagctgttgctctttaaatgccagtctgggcaggcctgtctgtccagaatatgccttcctccctcttttttattcatctaactccactcactcctcaggggtctcactcatgcagtcgccacctctgtgccccaccaggaaacctccccaacggtcccccaacctgcaccactccaaagatgtctctagatcagcccagactctgttgtccacctgtttctctcaactgaatgggaattatttattttttttttttttgagatggagtctcactctgtcaccccacctggaatgcagtggctcaatctgggctcactgcaacctccacctcccgggttcaagcgattctcctgcctcagtctcccgagtagctggaattacaggcgcccaccgccacgtctgaccaatttttgtatttttagtagaggcggggtttcaccatgttgtccaggctggtctcaaacccccaacctcaagttatctgcccgcctcagcctcccaaagtgctgagattacaggtgtgagcggcctcccaaagtgctgggattacatgcctggcctcaactgaatggtcattctaagagaattcccaatcctgcacacaaaaacagcataaattaactgaattagggaagccacgcctctgccagccgtgagctgggaagaagcagatacctcagaggcagggagcgcaggcgggtgatgatgagaggggccacagccgcagccccacgcaggggagcccaccactaaccctgcacccccacccctgcacaaaagagctggtgggcactagccatatcgccttgcaaccttcctcggatgcagaatccactccttcaggcatcctcttcctccaatgctctgaaggcctggggagcctgagagatgcccgctgcacccaggcagggctcgcctttgtttgccagtaatgggaattactcatatcttgtgcccagtgcccagcacagggactcatcgaatccacccctcagttaacacaagtgtctcttacaagacctccattttctccagccaggagatgggaagtcccaaccttgtgctaaagtctctggggcctctgcttccccatcagggctttctgcctctgctgtgggcaggttacctttatgcctcggaagagtgcagacctccatgcagcgggtgaggctgccagcctaggtggggtgtcattgaatgtcatgaagggagccagccttcatgcactctgcctgcgtctcctgaacagctttggaccaggagttgctaccttgtgcggagaacgtgtggtgcataagaacaaccgagcctctgctcttcgaaaatgtatattctggccaggtgcggtggctcacgcctgtaatcccaacactttgggaggccaaggtgggcaggttgcctgaggtcaggagtttaagaccagcctggccaacatggtgaaaccccgtttctaccaaaaataaaaaaaatagctgggtgtggtggtgcatgcctgtagtcccagatgcttgggaggctgaggcatgagaatcgcttgaacctgagaggaggaggaggttgcggtgagctgagatcacaccactgcactccagcctgggaaacagagcaagtctctgtctcaaaacaaaacaaaacaaaacaaaacccagtatattctaataaggaggagcagagaatcaacaacaacaacaaaaaagtgtaaataatttcaattaatagtaagtgctgtgggtcaggcacggtggctcacacctataatcccaacatttttcgaggctgagatgagaggctcacttgagcccaagaattcaagaccagcctgggcaatagagagataccctatttctacaaaaattacacagattagcagggcgtggtggtaggagcctgtagtctcaaccactggagagaaagaggtgtaaggatcacctgagcccgggagttcaagactgcagcgagctgtgattgtgccattgcactccagcctggatgacagggaaaactcctgtttcttaaaaaaataagtaaataaaataaacattaaaaacagcaatagcaagaaatacatataggccgagcacagtgattcgcacctctaatcccagcactttgggaggccaaggtgggcggatcacctgaagtcaggagttcgagaccagcctggccaacatgttgaaaccccgcctctactaaaaatacaaaaaaaaaattagccaggtgtggtggtgtgtgcctgtaatcccagctacttgggaggctgagggaggagaaccacttgaacctgggagtcggaggttgcagtgagccaagatcgcaccactgtactccagcctggcaacagagcgagactccacctaaaaaaaaaaaaaaaagaaagaaagaaagaaagaaagaaagaaagaaagaaagaaagaaagaaagaaagaaagagaaagaaacacatagggagcttttcttgtgccccagcactgtgtttagtgctgtctatgcattatctcataatgtggaaaagccatagcggctccatttcacagatgagaaaaactgaggcccgcaggtgagatcactcatgcccactggtctgccagctggggagtggctgggctagagttcaaacccacttccagtccgactgcacggcctgcactctccaccctaccatcttccacagtctccttgaattcctccagggcgaggccacgccagcgcacaactgcagggggcgccgttcccacagcagccctgcaaagtgagtgtgcctgagaaacttccgcctcccctgcacccagccctgtttagggcacgaggctgaatcaatggtaagtgaccatctaatggacccacaacacggtgacctggggacagtcatttctttctttttttttttttttctttgagacagagtctccctctgccgcccaggctgcagtgcagtggcgccatctcggctcactgcaacctccgcctcccaggttcaagcgattctcctgcctcagcctcccgagtagctgggattacaggcgcacgccaccacgcctggctaatttttgtattttcagtagaaacggggtttcaccatgttggccaggctggtatcgaactcctgacttcaggtgatcctccctcctcggcctccgaaagtgctgggattacaggcgtgagccatggcatccgacctggggacagtcatttctttgcctgcacagactttttgggggatgccacccctcacccctgctccctttgcaaggagaagtgccaagaagacctttcccaactcccccaccccccattctctaaggaatgaggccatcttgccatttatttatttatttgtccgttgttttgtttttaaatctctgatgcgccatcagaaaattatttctgcctctgcccctggcgtggctttcggagatgcttgtctgtcagccaatggggaggatcggattctggcagggggctgtgcttttccgtcaggccgccaccccccaccccctcctccctgcacacaaaagcagcataaattaaccgtcttcgggaagccgagcctctgccagccctgagctgggaagaagcagctacctcggaggcagggcgcgcaggcgggcggcgatgagagggggcgcagccgcagccccgcgctggggagcccaccgctaaccctgcaccccacccacccctgcacaaaagagctggcgggcgctggccacgtcgccctgggtgaccttcctcggatgcagaatccgcccctgcgagcatcctcttcctcctaggctctgaaggcccggggagcgtgagcgatgcccagctgcacccgggcagggctcgcctttgtttgccagtaaggaggagaggctgtctcagctgcagaggtgagtgcgcgcatctccccttctcccaggataaaccgtctccctggaaggtttatccggcagcctttgccgcctctaaatccctttccagcagatggggcgggtgggagcagagagccacggtcttgtgactccgtgaaggccctcacatccctgttcccggtaccagggaaaaccgttccctgagctgcgcccagcaacacagtttaccttccgcgcgcaccgttcccctctaagtgcaccattttcaggacacgctgagagctcgggcggatgaaaacctcagcttctctctgggacgctgaaatagacccatcctagccctatgtatttcctatttataacgctaggaaggccaccagccgacgatttcgggaaaaaaaaaaaaaaaaaatctaagtgtgtcgataaaggctgtcctgtggggtggggaggaagggggtggtttatggtttaagacacagatgcctcctccttattggaactcgtatgtgatttgttaataatcagacatcagggctcaaatgagcgcttcactcccgttccttgatgtcactgtcttcttttggccgtccccaaatgcgaagccaggatctgagtgcaggagtgtccggggcccactgaggacccaccccaccccatccttagaagactgtggagtcaacgcctgtggctgcagctggcagggggtgggggtcgggggcggggctggtgggagtgttcctgggggctgaggtcacacccagctcagtataaggaagggagaggcgaagaccccttcctccggagagcaaatgcgtttctactgccgaggagaacttaccctcgcgggaagggcctggctggctgctgccaccgccccccccccgaccccatagcatccaggagggattttttttttttccatgctgcgtgttactgtccctcctccaagcatgaatgacgacattgaggacagagaatcgagtgagaaacgctcaccctgtacgggggagggtctagttttagccgtcccctccccccacttcctcatctggctgaggctgcctctgggtccttccttgctaagccacagtcccctgtccccgatgcaaacccgatatctatgctggggggctgcaggtaacctactccacagagaggcagcctggatgccatgagagttgggggccttagatgcttcatgtatttggtttttttgagacagggtcttgctatcttgcccgggctggtcttaacctcctgtgctcaggcgatcctcgcaaagtgctgggattacacgtgtgagccactgcccccagccagatgctttatcttttattttattttttgaagtagggtctctgttgctcaggctggaaagcagtggcatgatcatagctcactgcagtctcgacctcctggtctcaagcgatcctccaacttcagcctcctgaatagctgggacttcaggcaccaggcacccatcaccatgtttggttaatttttgtatttttttttttttaagagatggggacttgctatgttgcccaggctggtcttgaccttccaggctcaagcgatcctcctatctcagcctcccaaagtgctggggattacaggtgtgagccaccgcaccagccagatgccttattttattttattttattttctgaaatagaacctcactctgttgctcaggctggaatgtggtggcacaatcatacctcactgcagcctccacctcctgggctcaggcaatcctcccacctcagcctcctgaacagctgtgacttcaggcacccaccaaatttaattaatttttgtttttgtttttgcttttcgtagagatggtgtcttgctatgttgcccaggctggtcttgaccttctgggctcaatcctcccacctcagcctcctgaatagctaagacctcaggcacccaccattgtgcttggttagtttttgtattttttttttgagagatggggtcttgctgtgttgcccaggctggtctcgaacccctggtctcaagtgatctgcccaaagtgctggaattccaggcatgcaccactgcacccagcccctagacgctttaaaaagtggatctagtggcccggcagggtggctcacacctgtaatcccagcactttgggaggcaggtggatcatgaggtcaggagttcgagaccagcctggccaatatagtgaaaccccatctctactaaaaatacaaaaattagctggacgtggtggcacgcgcctgtagtccaagctactcaagaggtggaggttgcagtgagccgagatcgcaccactgcactctagcctgggcgacagagcgagactctgtctcaaaaaaaaaatgacaacaaaaaaagtggatctagctactcggaagctgttgagagacagacagaggtaatggaaggacagagtgtacaatactctataatgactgccggacacaggcctgaaatcctttcgcaaacacgggaatgcacacagaaatgactattgcctttaagacaaggtttctccaccttggatctatggatatttgggacccagtcattcttggtcatgggcggccatcctgggcactgtaaggtgctgagcagcacccctggcctgcccagggggcactccttcccctcagttgtgacaaaagtgcctctagacaatgccaagtgtccccttgcagcaggggaggcagaattgtccacaggtgcaaagcactggtttcaaagcccaaaacagatggggttggttgagtcataagatgctggtatgttatgtccaaaaggtatcttagaggtcatctctaattcaactcttttgtttacagaaagggaaactgagacccagagagggagatggtctgagagtctgccatgccccagagcagaccacaactcagtctcacctggcagctctgatcctggcccccacccagactgctcccccctgccctgcccctgcccctgcccccagtgagctcctcagaacaagaaaaacaaaactggtgtggggggtggggcggcacagtggctcacacctgtaatcccagcgctctgggaggctgaggcaagaggatcacctgagcccgaaagttcaagaccagcctgggtgacataccaagatcagagaaattagccaggcatgatggcacacactcgtggtcccagatacttgggaggctgaggcaggaggatcgcttgagcccaggagttggaggctgtagtgagctgggatcacaccactgcactccagcctgggcgacagagcaagaccccgtctctaaataaataaataaataaataaagtggcattttgtggtagtaaagatgagggtctcctttctaaccccagtctctttccacactgccttagtgagccctggagtcagaaagtcactaggacttgcttgagggaggacagagaggcaggacaggtggcctggtacatatggcagatagcgatgggttagagcctactggattctctttgaacttggcattcccagcacggaagctgaagtatatcagccattcacactttagtatgaatgactgtttggatttcttgctttctagttgaggtccaaggcacaagagggagggtaagtctatctgggtcatggctcaccctggagaaggtagatttcgaagtttccaagggagcaggacttgtatctgaaggctcagcctctcgcccacgttcaaactctgaaccccactgtgcatcctaagctctctgtgcctctgttttctcatctgtaaaacaggggaacctcatggggctcggtgatggttcaataagaagtgctggccgggcacagtggtttacccttgtaatctcagcgcttagagaggccgaggcaggaggattgcttgagcccaagagtttgagaccaccctggccaacatagcaagacccaatctcttaaaaaaagattttaaaaaattacccaggcatgatggtacacacctgtggtcacagctactggtggggggctgaggcaggaggattgcttaagcccaggagttcaaggctgccatgagccatgattgtgcccctgcactccagcccaggcaacagagcaagatcatgtttttttttttaaaaaaaaaaaaaaaaaaaaaaaaaacagccaagctcagtggctcacccctgtaatcccagcactttgggaggctgaggcgggtagaccgcttgagctcaggagtttgagaccagcctggccaacacagtgaaaccccgtctctattaaaaatacaaaaattagccgggtgtgatggctcaagcctgtaatcccagcactttgggaggccaaggcaggaggatcacctgaggtcaggagttcgagaccagcctggccaacatggcgaaaccctgtctctactaaaaatacaagaattaaccaggcgtggtgatgggtgcctgtaaccccagctacttgggaggctgaggcgggagaatcgcttgagcctggaaggtggatgttgcagtgagctgagatggcaccattgcactacagcctgggcaacagagcaagactccgtctcaaaaaagaagaagaagaaggagaaggagagaggagaggagaaaggagagagggggaggggaagggggagggggagacggagggggagtgggagggggaagagctgcatggggtagacgattgtcattaggactattgtccagtaaaacccattcctctgcggcttcctttcaggggtcatccctgcttcaagccagtgcctcttcccagctcccatggggaccaccgaagccacgctccggatggaaaacgtggacgtgaaggaggaatggcaggacgaagatcttcccaggtaggacttccacatccctgagtcaaccgttgggggagcaggtgtctctcccaggtgggacacaggagcggcccgggtctctctctaagtgggaaccgcccggggctggcctggttccatctccgcgtcctcctctcccgcacactctgggaggcctgaggccctgtgtgcgagtcttctctgtggcctcacagtggggtagtcctggccaggcacataatgggtatttgctcaatgatttaagattcatttctgtcttccctgccccaaagctccaaaggaccccccacccctacaccattttaagagttcttaacattctggctgggcgcggcggttcacgcctgtaatcccagcactttgggaggccgaggtgggcggatcacttgaggtcaggagttcgagaccagcctggccaacatggcaaaaccgcgtctctactaaaactacaaaaattagctgggcatgccgggcgcagtgactcatgcctgtaatcccagcactttgggaggccgaggcgggcggatcatgaggtcagcagatggaaactatcctggctaacatggtgaaactccatctctactaaaaatacaaaaattagccgggtgtgtggcaggcgcctgtagtcccagctactcgggaggctgaggcaggagaatggcgtgaacccaggaggcggagcttgcagtgagccgagatcgcgccactgcactccagcctgggcgacaggtgagactccatctcaaaagaaaaaaaaaaaaattagctgggtatggtgtcatgcgcctataattccagctactcgggaggctgaggcaccatggtgatttattagcagcctttaggagacacttacctcccctaacatgctgaacttttttttttttttttttgagtctcactctgtcccacaggctggagtgcagtggcacgatctcaggtcactgcaacctccaggtcctgggttccagtgattctccttcctcatgcccccgagtagcttggattacaggcacccgccaccacatctggctgatttttctatttttagtagagaccggatttcaccatgttggccaggccagtctcgaactccgaaagtgcttggattccaggcaagagccaccgcgcccggcccctacgctgaacattttgcagggacatcttgtctacactctgtctccccaccacacggagcgccacaagagcaggggtctttgtttagctcactgctgtatcccaacctaaggatagtgcctggcatacagtcggcgcttaacaaatattgggtgacaggtgctgatcactggtcagaataagaaatcacaggggctgggcacggtggctcacgcctatgatcccagcacttacagaggctcaggctggggggattgatagagctcaagagttcgaaaccagcctgggcaagatagtgagaccccatttctaccaaaaaaaaaaaaattagctgggcatggtggtgtgcacctgcagtcttagctacttggcaggctgagacaggaggatcccttgagcccagaaggcagaggttgcagcgagccatgattgcagccctgcactccagtctgggtgacagagcgagactctgtctctattttattttattttttttattttatttatttatttatttatttttgagacagagtgtcgctttgtcgcccaggctggagtgcagtggcgcgatcttggctcactgcaagctccgcctcccgggttcacgccattctcctgcctcagcctcccgagtagctgggactacgggcacccgccaccacgcccggctaattttttgtatttttagtagagacggggtttcaccatgttagccaggatggtctcgatcgtctgacctcgtgatccgcccacctcggcctcccaaagtgctgggattacaggcgtgagccatcgcgccctaccacctgtctctatttaaaaagagaggaaaaaaaaaaaaaaggccggtcgctgtggctcaggtgtgtgtaatcccagcactttgggaggccaaggtgggcagatcacaaggtcaggaatttgagaccagcctggccgacatagtgaaaccctgtctctactaaaaataaaaattaaaaaaaattagctgggcatggtggtgcacgcctgtaatccccagtactcgggaggctgaggcaggagaatcacttgaacccgggaggcagaggttgcagtgagccgagatgtgccaccgcactccagcccgggtgacagtgtgagactccgtctcaaaaaaaaaaaaatactacatggaaaggaagctgtgcgaatttgctgttgagacgtgtgactctgatttgctggctaaagatagctgctcatccctcttccctttcagaaccaggaattcatccatcccccaaacacaatgcccaagggtcagttatagaaactattgggtgaggttcagtcaaaaagaccaggtgtgttccgcctgaaaaagagaattggaaaagaatctccaggccgcgcacagtggctcacgtctgcagtcccaacagtttgggaggccgaggcgggcaaatcacttgaggtcaggagttcgaggccagcctggacaacatggtgaaaccccgtctctactaaaaatacaaaaattagtcgggcgtggtggtgggcacctgtaatcccagctactcaggaggctgaggcaggaaaactgctggaactcgggaggcgaaggttgcagtgagccgagatcgcgccactggactccagcccgggcagtagagtgagtgagagtgtctcaaaaaaacagaatctccagttccaggaaaatttcaatctgagagggttccggagggcagaacgaggccaaaagaacgaacttaaaagagaatggggtttgaaggagatacagaagaatgccttgaagtaatcggtctccttcaaaatgagtcaggctggtgtgggaggccgagagcttccttcccattcatgtccaggcagaaggaggactgttgaagacggcatcttgatattcaagaacttcagccctctcctgaatccagtcattgccaggcctctaaggcccatgcacctgtctgtgtttctttgcagcaggaggtccctgttctcagaatagccgagaatcagagaatcacggctgggagcggaggctgatgtctgtaatcccagctctttgggaggccaaggcgggaggatcgcttgagcccaggagtttgagattagcctgggcaacatagcaagacctcgtctcttaaaaaaacaaaaaacaaacaaaaactggctgggcctagtggctcacacctataatcctagcactttgggaagccaaggctggcagatcacctgaggtcaggagtttgagaccagcctgaccaacatggagaaaccccgtctctactaaaaatacaaaattagccgggcgtggtggcccatgcctgtaataccagctactcgggaagctgaggaaggagaatcgcttgaacgcgggaggcggaggttgcagtgagccaagatcgcaccactgaactccagcctgggcgacagagtgagactccgtctcaaaataaataaataaaaataaaaaataaaaaaaaattagtcaggtatgctggtgtgcacctgtagtttcagctactcaggaggctgaggcaggaggattgtttggacttgggacatcgcagcagtgagctatgatcacaccaccgcactccagcctggacaacagagcaagactgcatatctaagaaaaataataataattttaaaataatgtcatttcaagcagcacagcataaacaaaggcgcataagctttggaatcggacgcccatggttcaaatcccaattccccagcaggtttgctctgccacctgggctacctctttgggcatctcagtgcctctgttttctgatctgtaaaataggacaataatctctcgcgcaccaggtggtcatgaaattttgataaaacagccgagatgggctgtgcaaatggcgaaggcagcacaaataaataatcatctccagcgttattactattattagcttagctccctttccccctactgatttttttttatttctttacttttcttttctttttttttttttgagacagagtctcgctctgtcacccaggctggggtgcagtggcgccatctcagctcactgcaacctccacctcctgggttcaagtgattctcctgcttcagcctcccaagtagctggattacaggcatctgccaccacgcccagctcatctttgtatttttagtagagacgaggtttcaccgtgttggccaggctggtctcgaactctcaacctcaggtgatctgcccacctcccaaagtgctaggattacaggtgtgagccattgggcccagctccacctataattttttttttttttttttttttttttttttttgcagacaaagtctcactctgtcacctaagctggagtgcagtggcgcgagttcggctcactgcaacctccacctcccgggttcaagcaattctcccacctcagcctcccgagtagctgggattacaggcacacaccaccacacccagctaatttttgtatttttggtagagacggggtttcaccatgttggccaggctggtctcgaactcccaacctcaagtgatccgcctacctcggtctcccaaagtgctgggattacaggcgcaagccaccacacccggcctccaccgataattttaaaagctctcatctcacccaagccttcttgagacaaaaaccaaggccgagcgcacctgcaaatgcaagctggaggccctttctggaaggcgcgaggccagcgggagcgggaggagggtgtgtttctggtggatttcttacagctgcaaggcttctcgcccacccgctgcagcagctttgtgtttgcaggacagtggcctcgctgtgccagcctggcccccacgagctacgcctttgccaacaggacacttcctccacgaggcttctgtcttcctcgtctctggaagaactgagtcggctcctcggtgcaggtccagctgcggccacacataaccacctctgtctgccgcaaaacagctcacaattctgtttcttccagcccagccatcccctcccctggggactgcagaagtggtctttgtactgcccttaagggtgtcagacagagccctgcatggcctctgcccttctagcacttttttttttttttttggagacagagtctcagtgtatcacccaggctggagtgcagtggtgcaacctcagctcactgcaacctccacttcctggtttcgagcaattctcttgcctcagcctcccaagtagctgggattacaggtacgcaccaccatgcctggctcatttttgtattttcgttagagacagggtttcaccatgttggccaggctggtctcgaactcctaacctcaagtgattcgcctgcctcggcctcccaaagtgctgggattacaggtgtgagccacgcgcccggcctccttctagcattttccttcactctcacccttctgcagcctactacggagctagagctgaaggcagcccggagattgctgcctcaatttctccattcattcattctgatgctatgcgccaactgtataccagtcccttatagcctcacaacccaatacaaggtggcagctgggttcatggcacttctgaccaggccagggagggaaggggagctgtgattcttggctgtgaagggtgaggagggatgagccggggaaggaagtggggtgtaggggccccacattccaagcagagagggcagcatgtgcaaaggctctgggctcagtggaagcaggttgagggactggggaaggctgcgtggggaaactgaggacttgggggaggagcttacccagggcatcctagccaaggagggtcagatgcagggtgagctgccccatagctccctctactctcttcccctcacagctgagtggctgccagttttgtttgcttgcttgtaactttttctttgtttgttttgggttttctggggggttttatttatttatttatttgaaacagagtctcgctgcaacgcccaggctggaatgcaatgacgtgacctcggctcgctgcaacctccacttcccaggttccagcaattctcctgcctcagcctcccaaatagctgagtttacaggcgcccaccaccacgcccagctaatttttgtatttttagcagagatggggtttcaccatattggtcaggctggtctcgaactactgacctcaagtgatccacccgcctcagcttcccaaagtgctgggattacaggcgtgagccaccatgcccagctgcttgtaactttttaattttttttttttttccagacggggtcttgctctgtcacccaggctggagtgcagtggtgcgatcatagctcactacagcctccacatcccaggctgaggcgatcctcccactgcagccccctgaatacctgggaccacaggcatatgccaccacacccagctatgttttattttctgtagagacagggtctcactgtgttgcccaggttggtctcaaactcctgggttcaaatgatcctcccacctcagcctcccaaaatgctgggattacaggcatgagccactgcgcctggcctatttgatatacttccaaacttggaaaaaaattacaagaatgatataaagaatatctgcatacctttagtaggattatacaattgttaacattttgctccttttatatcaaagtcagccctcagggctgggtgcggtgactcacatctgtaatcccagcactttgggaggccaaggcaggtggatcacctgaggtcgggagttcaagaccagcctaggccaacatggtgaaaccccgtctctactaaaaatacaaaaatcaactgggtgtggtggcgggcacctgtaatcccagctactggggaggctgaagcaggagaattgcttaaacccaggaggcagaagttgcaatgagcccagattgtgccgccacactctagcctgagcaacacagcaagactctgtctccaaaaaaaaaaatttaccctcaattgtaccgataatgtcccatgtccctatttagctaatgcccctgccccaaaccctgggtccaagacccaatctgggaccactcattgcatcaggttgagtatactgggttgtgtgtttactggggtatgtgtctcaccaggcactgggacttaaacttatctcttttaggggaacacgatccaacccacctcagcaggacgaagccacgctgtgcatcttgcatgtgggggggacccccacttttttttttttttttttttgagacggagacttgctctgtcgcccaggctggagtgcagtagcatgatctcagctcactgcaacctccgcctcctgggttcaagcgactctcctgcctcagcctcccaagtagctgtagctgggaccacaggcatgtgccaccatgccaggctaattttagtatttttagtagagacggggtttcaccatgttggccaggctggtcttgatcgcttgaccttatgatccacctgcctcggcctcgcaaagtgctgggattacaggtgtgagccaccatgcccggctaggatttccactttttacctggattgcccatcatggactttgagagccggctctgcagagggctaagtggatatattataccccagggccacggaggggatctccaagtctggagagtctgcggttctcctggagcttgcggaagtaacaggatctcacctgaccttggaaactgcagctccatgaacaggcggggagagcttgctccacccatgttccagagcagtgggtcttccttcagggagcctggagccctgccaggtcggcttctccagttctgcatgatcttaaacctttcctgaacatccactgcaactggcagctcagcctcaggacctcatcccatccccgaggcactgcctctccctggccctccctccctaccctccatcctccaaccactccctcctcccccactgctctctctgcgccaggcaccctgagtctgctttctgatctgcccttgaacttggcaagcttattccagtcccggagcctgggcctctgcagtgccttccatctggagtgctcttgcctggtctctgcaggacgccaacatcatgcttaaaagtctacacttaaaagtcgcttccagccaggcacagtggctcactcctgtaatcccagcactctgggaggccaaggcgggaggatcacttgagcccaggagttcaagaccagcctgcaagaccccatctgcagaaaaatataaaaattagctgggtggccgggcgcggtggctcacgtctgtaatcccagcactttgggaggccgaggcgggcaggtcacgaggtcaggagatcgagaccatcctggctaacacggtgaaaccccgtctctactaaaaatacaaaaaattagctgggcgtggtggcaggcgcctgtagtcccagctactcgggaggctgaggcaggagaatggcgtgaacccgggaggcggagcttgcagtgacctgagatcgcgccactgcactccagcctgggtgacagagtgagactccgtctcaaaaaaaaaaaaaaaaaaaaattagctggacatagtagtgtgtgctggtagtcccagctacttgagaggctgaggtaggaggattgcttgagcccaagaatttgagaccagcctgggcaacatggcgagaccctgtgtctgcaaaaaaaaaaaaaaaaaaaaactgtaaaaacctgaaaaattaaccaggtgtggcagctcactcctgtaatcccatcactttaggaagctgaggcaggagaattgcttgaaatgtgaagttcaagaccagcctaggcaccacagtaagaccctgtctctacaaaaaattttataattagccgggtgtggtggtgcacacctagggtcccagctactcagaagactgagacaggaggatcccttgagcccaggaatttgaggctgcagtgagctatgatttcactactgtgctctaggctgggcaacagagcaagaccctgtctcaaaaaaaaaaaaaaaaaaaaaaagctgcctcctcaatgaggccttccctgaccaccccacagatttttttctctctctctcctctcctttatttcattcattttctttgccgtaagcatcactatctgccttgttcacttatttgcttattgtcttcctttatatacatggtctcaagccaggaattgctttgcacaatcctgggaaccaccaagtccaaaatccacagggcaggctggaaactgtcaggtaagagctaatgctgcagtttttgtttttgtttttgagacggagtctcactctgtcgccaggctggagtgcaatggcacgatctcagctcactgcaacctccgcttcctgggttcaagccattctcttgcctcagcctcctgagtagctggggttacaggcatgcaccaccacacccagctaatttttgtatttttagtagagatggggtttcaccacgttggccaggctggtctcgaactcctgacctcaggtgatctgcccgcctcggcctcccaaagtgctgggattacaggtgtgagccaccgcgcctggcccccattttagtcatgaggaaaacagaggctcagggaggagaaggcaccacccagactcgtagcgctggatggagtggcagggctgggagttgtgctcagactctctgagactctcttaggcattcccaccctttctcctgctttcctcactttcccagtatgtgcagctgagatgctttctttttttctttcttttcttttcttttttttttttttttttgatagactcttgctctgttgctcaggcgggagtgcagtggtgccaatcacagctcactgcagcctcaaactcccggactcaaacgatcctcctgcctcagcctccttagtagctgggattacaagtgcatgccaccatgcctggctaatatgttgtattttttgtagagatggggtctcactatgttgcccaggctagtctcgaactcctagtctcaagagatcctcccacctcagcctgctgagtagctgggatcacaggcatgagccatcatgctgggctaatttttaaatttttagtagtgatggggtcttgctgtgtgggccaggcttgtcttcaactcttgggcttaagtgatcctccctcctcagcctcccaaagtgctgtgattaccggcatgagcccctgcgcccagtctgagatgctttctacagcttcacatttcagctgcagcccagcagtggtccacctagttcacagccaatgtagaatctgtgtggaccatccaatgttgtgaggttgaatcacatccctttttttttttttttctcgagacagagtctcactctgtcactcaggctggagtgcagtggcacggtctcagctcactgcaacctccacctcccgggttcaagcgattctcttgcctcagcctcccgagtagctgagattacaggcacgtgccaccacacccagctaattttgtgtttttagtagagacggggtttcaccatgttggccaggctggtcttgaactcttggcctcagatgatccacctgcctcggcctcccaaagtgccgggattacaggcatgagcccctgcgcccggcctgagatgctttctacagcttcatatttcagctgcagcccagcaatggtccactcagttcacagcctacgtagagtctgtgtggaccgtccaaggttatgaggctaaatcacatcttgagaatcgaaggcagtgccggctgcaaagcaatggggctttcctctggcgggaggagatggtggctggacagggaccctggctgggcaagtggttgtttgtttgtttgttttgagacggagtctcgctctgttgcccaggctggagtgcagtgtcacgatctcggctcactgcaacctccacctcccaggttcaagcgattctcctgcctcagcctcaccaatagctgggattacaggcgcccgccaccatgcccggctaatttttgtgtttttattagagacagggttttgccatgctgaccaggctggtctcgaactcctgacctcagatgatccacccgcctcagcctcccaaagcgctgggattactgaggcatgagccaccacgcccagccagaaatctagactttttgcatctcttcttcgacagcaaatggaaaatgtttttaaatgctgcatgggtgggacataactaggcttggtgcatcagccatcagcctgcaattttgcagcgctggtttgggttaaccttctgaatgagcaggtcagttcattcttcagtcctttctttgaagtttgctatatatatatatatatatagcaaaatctatatctatatctatatctatatctatctatatcgcctcgctctgtcatccaggctggagtgcagtggctcgatcatggctcactgcagccttgacctcctgggctcagctgatcctcccaccttggcttcccaaatagctgggactacagggacacgccaccatgcctggctttttattttttatagagatggagtctcgctgtgttgcccaggctgatctcaaactcctgggctcaagggatcctcccacctcagcctcccaaagtgctgggattacaagcgtgtgccacctcatgcccagccaaagcttgctttttaaaaaattgaggtgaggccaagtacagtggctcacgcatgtaatctcagcactttgggaggccgaggcaggtggatctcctgagctcaggagttcgagaccagcctggccaacgtggtgaaaccccatctctactaaaaacacaaaaatcagctgagcatggtggtgggcgcctataatcacagctactctggaggctgaggcacaagaatcgcctaaacccgggagatggaggttgcagtgagccaagattgtgccactgcactccagcctgggcaaaagagtgaaactccgtctcaaaaattaaataagtaaaataaaatttaaaaaatataaaaaattgaggtggaattctcataacatgaattcatcattttaaagttcatgattcagtggcagagtccattcataatgttctgcaaccccacatctatctaatttgaagacattttcatcaccgtgagaggaaatcctatctactaagtcagccccattttcatccctctcccccaaccccagtgaccacacatctacttcctgtgagaatttacgtgttctaaacatctcttttttttttcttttcttttctgttttgagcagggtgtcactctttcacctaggctggagtgcagtggtgcaatcatagctcactgcagcctcgacctcccaagttagagcaatcctcctgcctcagcctcctgagtacttggaactagacgtgtaccaccacacccagctaattgttttgtatttttagtagagacgggctttcgccatgttgccccgactggtcttgaactcctgggctcaatgaacccgcccgcatcagcctttcaaagtgctgggattacaggcataagccaccacactcagccaacatttcatgtaattggaatcacacactgtgtggccttttgtgtctggcatctctcactgagcatgatgtcctcaaggtgcatccatgctgtggtctgtgtcagagccctgttccttttcagggctaaatagtattccattgaatggatataccacatttgttgatccagtcagctgttaatggactggtgttgtttgtttgtttgtttgtttttgagacagagtctcactctgtccccaggctggagtgtagtggcgtgacttcagctcactgcaacttccacctcccaggttcaagtgatcctcttgcctcagcctcccaagtagctaggattataggcatgcgccaccatgtccagctaatttttgtatttttagtacagacagggtttcatcgtgttggccaggatggtctcaatctcttggcctcatgatgtgccctcctcggcctcccaaagtgccaggatgacaggcgtgagccaccgcgcctggccgtcaatggactcttgaattgtttccactttttggtttttatgaattatgttcattcaagtatgagttttcgtgtgaacagatgttttcatttcctttgggaatccgctccattttgatctttgccatgaacaggaggagggtgacatctgattcctcctttacctccaagccccatagatgcactggagacgcagtggttacgcaaaaacatttgatgaatagagaaaagagagggagggaaagggagagggaaaaagcataaatagattccgccccaaaaaggttaacagctcatgccctaagtggaacagaaatgagggaataaatctttttttttttttttttttttttgagagagagtctcactttgttgcccaggctggagtgcaatggcacgatctcggctcaccgcaacctccgcctccagggttcaagtgattctcctgcctcagcctccccagtagctgagactgcaagcacgcaccaccacgcccagataatttttgtatttttcagtagagactgggtttcaccattttggccaggctagtcttgaactcctgacctcaggtgatccgcccgcctcggcctccctaagtgccaggattacaggcatgagccaccacgcccggccaataaatcatttttttaaaggaaaggaacatgcattccaccgcccttccatctaaacagcttgccttgcagctgagccaggaatgctgagttacagagacgaattaagctgtagcctggctttccggagtcagcacgccctgccgctaggacctctggcagccccgtgcaaaatgttctgcccggaatggaatatttcccagggtagccaaggagccagtgctcctgggtcaaactcgggcagcacgggctgcggcttcaagaagtgatctggggccgggtgcggtggctcatgctgtaattccagcatttctgtctcaaaaagaaagaaaaagttgcaaagttagtacagataattcctgtagactgggaacctagtttctcccataattaacatcttatattagctgtgtatattttatatttgtcacaattgatgaatcaatattgatactattggttattgataatcaacattgatcaataacaatattgatcaatattggttattagttaccaaagtccatgcttttttagattttcaaagtttttcctaatgtcctctttttttttcttttctctctttttttttttaagagacagggtctcactctgtcatccaggctggggtgcagtggtgccatcatacctcactgcagcctccgcctcccaggctcaagcagtcctcccacctcagcctccagagtagctgggactacaggcaccaccacgtccagctaatctttgtaatttttgtagagacagagttacgccatgttgcccaggctggcctaatgtccttttccttctgccccacaaccccatccaggatcccagatgacatttagttatcacatctcctgacactcctctggactgtggcagtctccctgtctttcttgttttgatgcccttgatagttttgtttgtttgtttgttttgagatggagtctcactctgtcacccaggctggagagcagtggcacgatctcggctcactgcaacctccgcctcccgggttcaagcgattctcctgcctcagcctcctgatagctgggattacaggtgtcctccaccatgcctgcctaatttttgtatttttagtagagatggcgtttcaccatgttgtccaggctggtctcgaattcctgagctcaagtgatcctcctgcctcagcctcccaaagtgctgggattacaggcgtgagctgctgcgcctggcccatcctgtattttttggaatgacatcactatacacagcctacacagagttatccttcatcttttttttttttttttttttttttgagacagagtcttgctctgtggcccaggctggagtgcagtggcacgatctcggctcactgcaagctccgcctcctgggttcatgccattctcctgcctcagcctcctgagtagctgggactacaggcacctgccaccacgccccgctattttttttgtacttttagtagagacggggtttcaccatgttagccaggatggtctcgatctcctgacctcgtgatccgcacgcctcggcctcccaaagtgctgggattacaggcgtgagccaccgcacccggcctatccttcatcttcttgagggcagaactgtacataaactatttccaattcttctgcacaagaaatgtgtctcttctctcctgtttatttgttcagtgacttatttatatccgtatggactcatagacatttattttacatcttgggttataattcaatatttcattatttatttggttgcacaaactgttccagcattgacatagagatctcttctggttgactcaggtttttgtgggggttttatctatttatttatttttaatactttttgctgcatttgagagtcaacaactcatcagagaccaaatcccacagggtcgccctagagagaattcaacttactaacttatttcaaagtttttgaagtcatgtgatgctggggaaaaaccttcattctcctcaagccgtgcaaaaatctccaaaaggcttaatataaatttgattatctaaaagaagcccttcagccctgatgcgttataattttcttcctctgctaaagaaaaaacatgctgggcgggcgcggtggctcatgcctgtaatcccagcactttgagaggccgaggtgggcagatcacaaggtcaggagttccagaccagcctggccaatatggtgaaaccccgtctctactaaaaatacaaaaattagccgggcatggtagcgggcacctgtagtcccagtttacttaggaggctgaggcagaagaatggcctgaacccgggaggcggaggttgccgtgagccgagatcatgccactctactccatccagcctgggcgacagagcgagactctgtctcaaaagaaaaaaataaaagaaaaagaaaaaacatgcgcttgtggtggctcacgcccgtaatcccaacactttgggaggctgaggtgggaagatggcttgagcccaggagttcaagagcaacctgggcaacatagtgagaccccatctctacaaaaaaccaaaaaactacaaaaattagccagccgtggtggtgtgcacctgtagtcccagctactcaggaggctgaggcaggaggatctcttgagcccaggaggttgaggctgcagtgagccatgatcacgctactgcactccagcctgggcgatacagtgaggctctgtctccaaaaaaatgtatatatttaggtccagtgattctccagaactaaatgtgttttgcttttgttcttgtctgactcgcctggctggacctgtctgggccactccactgtcctctgcctgaatctctggtgcccggcgactgatgcctgttcctggatgggtccgcaggccactcccagaagagacgggggtggaactgcttggcagcccggtggaagacacatcctgtaagtttccacgtccacagaagggcggaaacaggctcagtgtttccgggtttcagccctgcctggggctgtaactgtagaaatgtcagaggccacacaccgtgggtagaatgttctgtcctggggtctatggtggaagtggccgtggtgggtgagagacacaatggatgatggcgctctcatgaagccagcacgctgtgttgctgtgtgtccctgtgctagtcactcagcctctctgtgccccaatgcctcatctactaaatgtaggtagcgagcttctcgcagagggggcatgtaaggattaaatgaggtgatgccaaatgccctggaggcacaaagtcagcacagccaagggtgcactgggaggctctgctatctggagctctaaacatatacattttaatgtgtaataccttatattagacccaaatatatacattttttgggagaccgggtcacactctgtcatccaggctggagtgcagtggcgtgatcatggctcactgcagcctcaacctccagggctcaagagatcctcctgcctcagccttctgagtagctgggactacaggtgcacaccaccatggctggctaattttggtagtttttgtagaaatgggatctagctatgttgcccaggctgctcttgaactcctgggctcaagccatcttcttgcctcagcctcccaaagtgctgggattacgggcgtgagccaccacgcctggcatgttttttcttcagcagaggaaaaaaatcataatgtatcaggctctgaagccccagatcccggggatgggagtcctgggcggccagaggagagttttagccgtaacctggcgattgcaacgtgcctccggaggcagggaaagggcccaggttggcaccgtggggagaggtggggtctggggaggacctggcagccagccccacttaacgacattcagttaagcagaatatggaaaataaacctgtgagggccaaacaaaatttttttggagacagagcctcactgtatcgcccaggctggagtgcagtagcgtgatcatggctcactgcagcctcaacctcctgggctcaagagatcctcctgcctcagcctcctgagtagctgggactacaggtacacaccaccatggctggttaatttttgtagttttttgtagagatggggtctcactatgttgcccaggctgctcttgaactcctgggctcaagccatcttcccaccttggcctcccaaagtgttgggattacgggcgtgagccactgcacccggccgcctgtctctatttaaaaagaaaaaaaaaaaaggcaggtcaccgtggctcacgcctgtaatcccagcactttgggaggccgaggcgggcagatcacgaggtcaggagtttgagaccaacctggccaacatggtgaagccccgtctctactaaagatacaaaaaaaaaaaaaaaaaaaaattagccgggcattgtggcacttgcctgtaatcccagtcactcaggaggctgaggcatgaggatcgcttgaacccaggagacggaggttgcagcaagctgagattgtgccattgcactccagcctgggtgacaaggcgagactctgtctaaacaaaacaaaacaaaaaaagattagtcgggcttggtggcgcatgcctgtaatcccagctacttgggaggctgaggtgggagaatcacttgaacctgggaggcggaggttgcagtgagctgagatcctaccattgtactccagcctgggtaacggagtgagactccatctcaaaaaaataaatacataaataaaacaaaataaattagcagactttggattaaagcaggcagccatctgtgatgtgggtgggcctcatctaatcagttgaaggttttaagagaaacagactgaggttcccccaggcagagacaattctgcctgcggacggttttgcaacatcaactcttccctaggcgtcccgcctgctggcctgccctgccgattgaggacttgtcagtctctgtgatcacacgagctaattccttaaaataaatttctccctctctctttttttccatacatataggaaaaaaatatgtatacacacacacacacacacacacacgtcctattggatttgtttccctggagcactctgattaaaataggagactatcctggatcctgtattatccaggtggcctgacatcgttacaggatcctcatgagtggagacaggagggtgagagtcagagaaagcctagaagaagatgggctgctttcacaatttgtctgcacaagagatatgtctcttctcctttatttatttatttatttatttttgagatagagtttcactctgtcacccaggctggagtgcaatggtacgatcttggctcactgtaacctccgcctcctgggctcaagtgattctcctgcctcagactcccaagcagctgggattacaggcgccaccactgtgcccggctaatttttatatttttagtagagatggggtttcgccatgttggccaggctggtctcgaactcctgacctcaggtgatctgcccgcctcggcctccaaagtgctgggattacaggcgtgagccaccgcacccggcccaaagtcaggctttgaactcatgtctgcccaatgtccaagcatccatccccttaatctctgaggcttgcccacaggacagaggttataacattcacccctgtcaggatgatgtcggtttaattctgcccacccccgccaatggcatggatacagaagggagcccaccctctcttcccattcctgcatgatgaaacagcttccaccaggtaggaaaatggggggaaggtaaaagagagaaagcaaagatgttttccatttttctcatttccctgcagctcctcccaacacgctaaatttcaacggagcgcatcgtaagaggaagacgctggtggccccagagatcaacatttctctggatcagagtgaggggtccctgctgtccgatgacttcttggatacccctgatgacctggatattaacgtggatgacatcgagacccccgatgagaccgactcgctggagttcctggggaatggcaacgaactggagtgggaaggtaaagttcagggtctctctggggcctgctggagcccaccccccccaccccacctttccgtctctggattcccataggctcagagagtcacaagtggggcaggggctctaagcagtctagccttaaacccaggagatcaagactgcagtgagacgtgatcatgccactgcactccagcctggacaacagagtgagaccctgtctcaaaaataaaatttttaaaaaagagagaggtggctgggcgcagtggctcatgcctgtaatcctagcactttgggaggccgaggcgggcagatcacgaggtcaggagatcgagaccatcctggctgacacagtgaaaccccgtctctactaaaatacaaaaaattagccaggcatggtggcgggcacctgaagtcccagctactcaggaggctgaggcaggagaacggtgtgaacccaggaggccgagcttgcggtgagccaagattgtgccactgcactccagcctgggcgacagagcgagactccgtctcaaaaaaaaaaaaaaagagagagagaggttggtgaatgggtaccaacatacagttagacagaaggaataagttctattgttcgatagcagaataggaggggtgccaggaggagggtccatccgctcctgcgactgttttttttttttttttgagacagagtctcactctgttgcccaggctggagtgcagtggtgtgatctcagctcactgcatcctccacctcccgggttcaagcgattcttttgcctcagcctcccgagtagctgggattacaggcatgcactaccacttccggctgatgtttatatttttagtagagatggggttttcccatgttgcccaggctggtctcaaactcctgacttcaagtgatacacccacctcggcctcccaaagtgctgggatcacaggtgtgagccacggcgcccagcctgcccctgcaatttgatgcatatttttcttgtgggcttgtgaatttttctgcagaacgtggctttcatcagaatctcaaaggcgaccaagatcccaacaaactgccctcgatgtatgcaacaaatactttttgaccatttactccagggcaagtcctgattcaggcgtggggtatatggcagggctatgataagaagagatggtcctggtccctacctgcacacacagatcatcagaaagacagaccacgaaaggccaggcgcagtgactcacgcctgtaatcccagcactttgggaggctgaggtgggcagatcacctgaggtcaggagtttgagaccagcctggccaacatggtgaagctccatctctactaaaaatacagaaattagccgggcatggtggcgtgcgtagtcccagctactcgggaggctgaggcaggagaatcgcttgaactctggaggcagaggctgcagtgagcagagatcgcaccactccactccagcctgggcgatggaacaagactctctcaaaaaaaaaaaagaaagaaaaaaaaaaattaaggacaatgtagtggctcattcctgtaatcccagagcttcgggaggccagggtaggaggatcgcttaaggccaggagtttgagaccagcctgggcaacatattgaaaccccatctctacaaaaatataaaaattagctgggtgtggtggtgcacaactgtagtcccaggtatctgggaggctgaggcaggaggactgctctctgtgtgccaggctcctgggagagtaaaaaccaagcatgcatgccccgagtatcctcgtggtttgatgaagcagatgcattcaccagctctgagaagctccaggacacaggtccttaaccaacagagtgccctgggaggccagcaaagggaatgtccagaaaggcttcctggaggaggcggcatttgagccaggccttgaaaggggagtaggagaggaaaatgggtcagcagggcagccaggtggggagaagcgaaggacttgtgggtcccggcagcgagggaggtgggagaggggaaggaaggctgagcaggagggcaggagatatccggactctggcgtccatgcgactctccgccacctgcttctagacgacacccccgtggccaccgccaagaacatgcccggggacagcgcggatctatttggggacggcacgacggaggacggcagcgccgccaacgggcgcctgtggcggacagtgatcatcggggagcaagagcaccgtatagacctgcacatgatccggccttacatgaaagtggtcacccacggaggtgagacccgccccccggtgcccccttggggctccagcccggcccactgggcaacagggggttcgtcagtgcccctctctgatgcacggggatgttaagccgtcaactcgcttcgggtggacggactgtgggcaaggcgtgcatggtcagggaggcgcactgggggcccctgatggtcgctgtcactcctcagcgaaggcagagactggctaaggggtcgccggctgctgtggctcggagccatgccctcccgagcgtgtgggcaccgggacgtggtgggtggtgcgcgggaggcagctcagggctgggagaggactctgacgttgccgatcggctgcctctcctcagggtactacggcgaaggcctcaacgccatcatcgtcttcgcagcctgcttccttccagacagcagcctccccgactaccactacatcatggagaacctcttcctgtgagtccccgcccgcggcgagcagcctcgggccagctctgatgcctccctggccacaggggcaccaggctgcaaggattgcattgtggccctaggaagcctgcctggcaccagggaagggcgtggtggccacagaccttgatctgagtccctgctggccctgaggctcacagtggccttccctctgggccaccctgttctcctccccgtcctcctcctcctcctcttcctcctccttcccctcctcctcactgtcctcctcctcctccccttcttcctcccccttcccctttcttctcctccttctcctccccttcttcctcccccctcctcctcccttttctcctcctcctccccttccctctcctcctccccctcttccccttccctctcctcctcccccctcttccttctcctcctcttcctcccctttctccacctcatcctctttctcttcctcccctttctccccccttcctcctccttctcctccttccctcatcttcctctccttccctctcctccccctccccatcctcctcctccccatcctcttccccttcctcctcctcttcccgctctgagatggcaccactgcactccagcctgggtgacagagtgagaacctgtctcaaaaaaaaaaaaaaaaaaaaaaagcaaggcctagagaccagcctggccaacatagtgaaatcctgcctctactaaaactacaatttagctgggctcggtggcaggcgcctgtaatcccagctactagggaggctgtggcaggagaatggcgtgaacctgggaggcggagcttgcagtgagccgagatcgcaccactgcactctagcctgggcaacagagcgagattccgtctcaaaaaaaaaaaacgactcaataaaagagtaactgccctatgaggatgcccgctgacactcatgtggagtgtgctgggatcatccacgtcctctcccaccctgcagtccgccaggacagcagacaacacctggaccagtggggctgacccagccagcggcaggagtggaggcaggcagggtcggcaccgcaggtgtcctgaccctggacccctccatgttgggtccctgccttctgtgccccgtgagcaggtacgtcatcagcagcttagagctcctggtggctgaggactacatgatcgtgtacctgaacggtgccacgccccggcggaggatgcctggaatcggctggctgaagaagtgctaccagatgatcgaccggaggtgaggtggggatgcctcaggaagcacagtgggggcatgaaaatcacacagggggctggacatggtggctcacacctggaatcccagcacttcgggaggctgaggtgggaaggtcccttgagcccaggagtttgagaccagcctgggcaacgcagcaagacgctgtctctacagaaaaacttttaggccgggcaagggggctcacacctctaatcccagcactttgggaggccaaggtgggtggatcacctgaggtcaggagttcaagaccagcccggccaacatatagtgaaaccccatctctactaaaaaaattcaaaaattagctgggcgtggtggcgcatgcctgtagtcccagctacttgggaagctgaggcaggagaatcacttgaacccaggaggtggaggttgcagtgagccgagatcatgccactgcacttcagcctgggcaacagagcgagactctgtccccatgaaacactcactccctattccttctccccaggctccggcaccccccatcctactttctgtctctgtaaatctgatgactctagggacctcctaggactggaatcacacaggatttgtccttttgtgtctggctttcctcactgagtgtgatgtcctcagggtgcatccacattgtagcctgtgtcagagcctccttccttttcatggctgcataatattccactgtatggacataccacatttggtttgtccattccattcatctcttgatggacatgggttgcttccacccctgagttattgtaaatagcctcagagtgacattaaaattgagccagccaatccatccttgcacccaggttagtggagggaggctccaaggacaggctggtccctcctagggcattaggtggtgaaaatacaatcttggctgctcaaataactaccaacctggttcacctgctctgcaccatggggtctctacctacctcatccacctgagggtcttagggactcaaagggtgtgtctttatcccaccataggacccccatgtcttggatgggggcagggatttgacaggtacctggagaccacacgtggaatgagcagagtgacgaatgcttgcttgtggctctcccgtcccacccagctcctccctccccagggctcgccccaggagcccatcttgcttcctttgcggccccacacaggttgcggaaaaacctgaagtccttgatcatcgtccacccctcgtggttcattcggactgtgctggccatctctcgccctttcatcaggtgagacggggaggctgcaacccaagtccagtggcctcagtgtgcgtgtgtgcgtgtgtgtatgcatgcatttgtgtgtgcatgtgtgcacgtgtgtgcgtgtgtgcatctgtgtgtgtgtgcatccatgtgtgtgtttgatgtgcatgttccagcttctctatgatgaatacatattattgctttaaacagttttaaattgcacacagccaggcacagtggctgacacctgtaatcccagctactcagaaggctgaggtgggaggatcgtttgaggccagcctgagcaacatagcaaaacccccatctctacaaaaaatacaaaaattagcaggacgtggtggtgcacacctgtagtttcagctacttgggaggctcacgtgggaggatggcttgagcccaggagatcaaggctgcaatgagccgtgatcgagccactgtactccagcctggatgacagagtgagaccctgtctcaaaagaaaatcagtcatgcatggcatcacatgcctgtagtcccagctactcaggaggctgaggcaggaggatcacttgagcccaggaggtagaggctgcagtgagctatgatcactccactgcactccagcctgggagacagagcaaaacaaccctgtctctaaaaataaaatatatatatatgtatgtataaataaataaataatatgactaataaatttaaaatttaaaactacatatattctataatgtatatcatatatagttactatattaaacatatagtaaaacagatcaagtgaaataaaattaggcatgttaaatgccctattcaatccaataaaatgtcatgcaaatttaatttaatctaatgcaaaacattgaattgaataaagattcctaatgttcacgttcccagttacaaatctgggatgagcgaaagagacgagggcttcactttcccttgaacaacaggacacattcacagcaggcccgattttcaaggaagactctttaaacatgctgttttcaaggactgctaagtaccctgaaggggcttatttgcatattagcgaaatgagatgaggaatacactaattatggatcattttagctaataatgaatcaacaggcaaaacggtaaacacgcatttcagtctaagataattgcatttgctcctctatattccagaattcagtaacatagactacctttgcctttaatgtagatattaggatggtgcaaaaataattgaggttcttgccatattttcattacaaaaactgcaatcactcttgcacgaacccaataattctgtcactcttcaccggtcgccatggctcacacctgtaatcccaacactttggaaggtcgagatgagaggatcgcttgagcccgggagttcgagaccagcctgggtgacatagcgagaccctgtctctacaaaaaaaaatttttttttttttcagacggagtctcactctgtcgcccaggctggagtgcagtggcgcgatctcagctcactgcaagctccgcctcccgggttcacgctattctgcctcagcctcccgagcagctgggactacaggcgcccgccaccaggcccagctaactttttgtatttttagtagagatggggtttcatcgtgttagccaggatggtctcgatctcctgacttcgtgatccgcctgccttggcctcccaaagtgaaaaaaatttttttttaaatacggccaggtgtggtgacccaggcttgtaatcccagcactttgggagaccgaggcaggaggatcgcttgaggccaggagttgaagaccagtctgggcaacatagcaagacctccatctctacaaaaaaaaattttttttaattagccaggcctggtggcgcgcacctgtgatcccagctactcagaggctgagggaggaggatcacttgagcccaggaggtcgaggctgtagtgagccatgattacaccactgcactccagcctgggtgacagagtgagactctgtctcttaaaaaaaaaataccatgaagtgctggtgatgaaacaccacatggtatcagatggccagaattcaggattggaagggaaagaagggaaagaaccattcatccctgaaaaacagagaattgggccaggcagggtagctcatgactgtaatcccagcactttgggagttagaggcaggcagatcacatgaggtcaggagttggagactagcctggccaacatgatgaaaccccatctccattaaaaatacaaaattagccgagagtggtggtgcatgcctgtagtcccagctactcgggaggctgaggcagggaaaatcgcttgaaccggggaggcggaggtggcagtgagccgagatcacaccactgcactccagcctgggtgaagagcaagactctgtgtcaaaaaataacaataacagagaatcaatgggcagccccgtgtgcccccttcttgtgcccagctgagtgttggctgtgccgtcctgtgcggtgacatggagagaaagcatccctgggaaaaattaacacagaggagcaacttttagagatgatgggaaaacagcctgtagagtctaagacaatctccccacctcctgacttccttccaacaagatcctcattgcagggacccatgtcaggtgcatggccctgcttgcaagggcctcggcgcagacccggggtctccactccatgcatggggtgcaagataattaaggctgtcatcgggcgggagggaggtgtcgtcgtctgcactggggcatcctggagtggggtcctgtggggatccctgtcgccatggctctgtctggacctaggtaacccccaccccatgggttgcatttcagacctctccctccttctccccccgccagcgtcaagttcatcaacaagatccagtacgtgcacagcttggaagacctggagcaactcatccctatggaacacgtccagatcccagactgcgtcctgcagtgagtggccccacagtccaccccgccgtattagtctgttttcgtgctgctgataaagacacacctgagacagggcaatttacaaaagaggtttaaggggccgggcgcggtggctcctgcctgtaatcccagcactttgggaggctgaggcgggcggatcacgaggtcaggggatcgagaccatcctggctaacatggtgaaaccccgtctctactaaaaatacaaaaaattagccgggcgtggtggcgggcgcctgtagtcccagctactcaggaggctgaggcaggagaatggcgtgaaccccggaggcggaggttgcagtaagctgagatcgcgccactgcactccagcctgggccacagagcgagactccatcgcaaaaaaaaaaaaaaagggctaacggactcacaattccatgtggctggcaacgcctcccaatcacggtggaaggcaaaaggcacgtctcccatggcggcagagaagagaaggaaatttgtacaggcaaattcccctttataaaaccatcagatctcatgagacttactcactgtcgcgagaatagcacaggaaagacctgcccccatgattcagtgacctcccaccaggtcactcccacaacaggagggaattatgggagctacaattcaagatgagatttgggtgaagagaccaggcaaggtggctcacacctataatcccagcactgtaatcccagcattttgagaggctgagacaggcagatcacttgaggtcaggagttcgagactagcctggccaagatggtgaaaccctgtctctcctaaaaatacaaaaattagccaggtgtggtggtgcatgcctgtaatcccagatactgaggaggctgaggcaggagaatcgcttgaacctgggaggcagaggttgtggtgagccgagatcgcaccactgcactccagcctgggcaacaagagtgaaactccgtctcaagaaaaaaaaaaaaagatttgggtggagatacagtcaaaccctgtcacccccaacacccccccaccgggtccccctggctaccaggagccagcaatgaggggaaacgcagacttggaagggaggaactagaacccacccattttatttcctggagcccctcagggaccccccggagcttggggaagggatgggcagcttcaagtcctgttgtttttcactgaatgtcatatcatcggcacctcccctaggttcatgctgcaaaaatctccttaaacgtacatttttttattgtggtaaaatacacgtaacatagaacttcccatcttagccattccttttttaattttatttatttatttattttttgagaaggagtttcactcttgttgcccaggctggagtgcaatggcgccatctcggctcaccacaacctccgcctcccgggttcaagcgattctcctgcctcagcctcccaactagctgggattacaggcatgagccgccatgcctggctaatttttttttttttttttgtatttttagtagagacagggtttctccatgttcgtcaagctggtctcaaacccctgacctcagatgatctaccggcctcggcctcccaaagtgctgggattacaggcgtgagccactgcgcccggcctatcttagccatttctaaaagcacattcgcatatttgtgcagccatcaccaccatcctctccagacctttcttttttttttttttgagatggagtcttgctctgttgcccaggctggagtgcagtggcacgatctcgggtcactgcaacctccacctcctgggttcaagtgattctcctgcctcagcctccccagtagctgggattaaggcacccaccaccatgcccagctaattttttttttttttttttttgagatggagtttaactcttgttgcccaggctggtctcgaactcccgacctcaggtgatccgcccacctcagcctcccaaagtgctgggattacaggcgtgagccaccacgcctggccgatttttgtatttttagtagagacggagttttgtcatgttggccaggctggtcttgaactcctgacctcagttgatctgcctggctcggcctcacaaagtgctgggattacaggcatgagccactgcacccggccctctccagaacgttctcatcttcccaaactgaaactctgtctccatgaaacactcactccccattccacatcccaacccctggcagcccccatcctactttctgtctctgggagtctgacgactctagggacctcctaggaatggatccacacaggatttgtccttttgtgtctgacgtctctcactgagcgtgacatcctcaaggtgcatccacattgtagcctgtgtcagaatgtccttccttttcatggctgaataatattccattgcgtgaatggaccacattttgtcaatccatttgtccatcaatggacaattgggttgtttccaccttttggctcttgtgaatagtcatgttatttatatgctactcacctatgaccgtagatgtacaaatatctctgtaagaccctactttcaattctaatgagtatatacccaaaagtggaattgctgataattctgtttttttgaggaaccaccatactgttttgttttgttttgctttgctttgcttttttgagacggagtctcactctgtcacccaggctggagtgcagtggcgctatcttggctcgctgcaacctccacctcccgggttcaagcaactctcctgcctcagcctcccgagtagctgggactacaggcgcccaccaccacacccagataatttttttgtatttttagtagagatggggtttcaccatgttggcctggctggtctcaaactccccacctcagcctcccaaagtgctgggattacaggcgtgagccatcgcacccagcctgttttttgttgttgttgttttgttggggtttttctggtttttttttttagacagagtctcactctgttgcctacgctggaacgcaatggcgcaatctcggctcaccatatcctccagcttctacgttcaagggattctcgtgcctcagcctcccgaatagctgggattacaggcacctgccaccacgcccagctaatttttgtatttttagtagagatagggtttcaccatgttggccaggatggtctcagtctcctgaactcagtgatctgcccgcctcggcctcccaaagttctgggattataggcgtgagccaccgtgctcagccaacacataaacatttataatcaaaaatgcatctatgggccaggtgtggtggctcatgcctgtaatcccagcactttgggaggctgaggccagaggatcgcttgagcccaggagttggaggctacaagtgagttcatgccactgcactccagtctgggctatgacagaatgagaacctgtctaaaaaaaagagaagaggccgggcgcggtggttcgcgcctgtaatcccagcactttgggaggccgaggtgggtggatcatgaggtcaggagtttgagaccagccaggccaacatagggaaaccccgtctgtactaaaaatacaaaaaattagctgggcgtggtagcaggtgcctgtaagtcccagctactccggaggctgaggcagcagaatcactcaaaccggggaggtggaggttgcagtgagccaagatcgcaccactgcactccagcttgggcgacagtgcaagactccatctcaaaaaaaaaaaaaaaaaaaaaaaaaaggaagaagaagaagaagaaaagaaagaaaaaagagagcttgtttctctgcttgaaaaggaaagggatttccccaaaaagtatatctcaggggaaaggaaggttgtgtctgacatctttttctttctttcagatacgaagaggaaagactgaaggccaggagggagaggtgtgtgcagagtggtttctgctggggctgggtcggggcagcggggggctgagctgaactctcagttagggcaacccggtgacttctgggcagcagggaccattgtcctgtgcagggctcaagacgctgcccttctggcaaggactttaaactcagacctgggttcaaatactggctcccgcattgagctgcaaggtaacattaagcaaataaaaagctaacaaccaccttggaggttattgtgcaagatgaggcacccttggcaaaaaaggttgagcacagacttcacgctccataaagcataaaagtcaagacgggcgcggtggctcacccagcactttgagaggctgtaatcccagcactttgggaggctgaggcaggaggattgtgtgaggtcaggagttggagaacaacctggacaacatggcgtaactccgtctctaccaaaaatacaaaaattagccaggcgtggtggtgcgtgcctgtaatcccagctacttgggaggctgagccaggagaatcacttgaacctgggaggcggaggttgcagtgagccgagatcatgccactgcactccagcgtgggtgacagagcaagactctgtctcaaaaaaaaaaaaaaataaattagccaggtgtggtggcatgcgcctgtagttcagctacttgcagggagactgaatcgggacgactgcttgagcccaggaagttgaggctgcagtgagccatgattgtaccattgcactccagcctgggcaacagagcaagatcctgtctcaaaaaaaaaaacaaaaaaaaacagcctttatcatgccaggtccaatgccagctttgagggaaacagaggcaaataagacagagtcttggtcccagaagttttctcaaatagcaaaggcagggaacatctcactggtttggaaaacaggtcccaggggacaggaaaaccagagaggccagtactagctgagagcccaccccttggcctggctgggctagtcacccttgtcacctcgttctctctgtccacagcgcgaggccccagccggagtttgtgctgcccaggtctgaagagaagccagaggtggcaccagtggaaaacaggtaggtgtgcaggggaccatgggcagagagctgacagtcacgggaggctgcctactcccttgggggaggctagagaggaagatgggtccttgttcagggacagaaaatggaactaagtggccggccatggtggctcacgcctgtaatcccagcactttgggaggccgaggtgggcagatcacatgaggtcaggagttcgagaccagcctggccagcatggtgaaacctcatctctactaaaaatacaaaaattagctggacatggtggctcacatctgtaatcccagctacttgggaggccgaggcaggagattcgcttgaacccagggggcagaggttgcagtgagccgagatagtaccactgcactcggcgacaaagtgagactccatctcaaaaaaataaataaacaaataaaataaaaataaaaattatcggccgggtgtggtggctcacgcctgtaatcccagtagtttgggaggctgaggtgggccgatcacaaggccaagagatcgagaccagcctggccaacatggtgaaaccccatctcttctaaaaatacaaaaattagctgggcatggtggctcgtgcctgtagtcccacctacttggaaggctgaggcaggagaatcacttgaacctgggaggcggaggttgcagtgagccgagatcagaccactgcactccagcctggcgacagaatgagattctgtctcaaaaataaataaataaataaatatcatccaggtgtggtgatgtacacctctagtccagctactcagaagggtgaggcaggcagatggctggagcccaggaggtcaaggctacagcaagctatgactgcactccagcctgggcaacagagcaagaccctgtctcaaaaaaaaaaaaaaagttatcatgatgttctcatattatcgcaatctcaatgttatcataatgatgaaaggtgacctttgtccaggtcccagcaggtagattcagactcccccaatccagtagaccctgagcaacattattggcttcattttatgttagtgaagggccttggccaatttcctcaaaactgtctgtttgggctcatttgttacgcagcagatgcacgctgacatctgttttgtaccagatacagcagtgtcggtcctcatagggcttacagcctccacgaacaggtagaaaatgcccaagaatgggcactgtggctcacgcctgtaatcccagcactttcggaggccaaagcaggaggaccatttgaggtcaggagttcgagaccaacttgggcaacatattgagactccatctctacaaaaagtttaaaagttagccaggcatgatggtgtataccttgtagtcccagctacttgggaggctgaggtgggaggatcacttgagcccggagctggaagctgcagtgagccatgattgcaccactgccctccagcctgggcaacataacaagaccctgtatcttttttttttttttaagacagattttcactcttgtcgcccaggggccagagtgcaatggtgcgatcttggctcactgcaacctccacctcccgggttcaagcgattctcctgcctcagcctcccgagtagctgggattacaggcacccaccaccacacccggctaatttttgtatttttagtagagacagggttttaccatgttggccaggctggtctcgaactcctgacctcaagtgatccacccacctcagcctcccaaagtgctgggattataggcatgagccactgcacccagccaagaccctgtatcttaataataataaataaataaaaataaaataagttaaagaaaaaaaagggaaaatgcccaggctcccaaaaataagcaaataacgcccagtctccgtctctcctccacaggtctgctctggtctcagaagatcaggaaacaaggtgggtgtgatgcagagtggtcttcgtgctgttttcaaaatgtccttcatggacctgtattagtcagggttctctagaaggacagaaaatcaaaccagctgccagcaaatataaagcaggcagggatcctaatcccaggaaaactgccccatgacttatcgggagtgggggatacggcaccgggaaggcagggaggtagtggttcccttaaccagtcaggccgtccttgcacaactccaggggggcaccattacctagaccaggatgcaaatgaggccccagagttatgcagtggagcggccctcagggaaaaacccacacagagccaagctccctgaagcccaggatatgataccacaaaagggtagactgtccacgctctgcctccgattctccacctggttctggatgccaagaaaagcctccctgtggccgggcgcagcgtctcacgcctgtaatcccagcactttgggaggccgaggcaggcggatcatttgaggtcaggagttcaagaccagcctgggcaacatggcaagaccccgtccctaaaaaaaatacaaaaattagccaggtgagccaagatcgtaccactgcactccacagcctgggcaatagggctagactttgtctcaaaaaaagaaaaaaaaaaggaaagaaaagaaaagcctccctgtgtgttgatgtccaagggtatcctcaggcacaatggtttgccagaaggactcacagagctcagcaaagctgtcatactcacagttatggtttatcacagtggcatggtttattacagtagaagggtacagttaaaaatcagcagagttgggtgtggtggctcatgcctgtaatcccagcactttgggaggccgaggcaggtggatcacttgaaatcaggaattcaagaccagcctggccaatatggtgaaaccccatctctactaaaaatataaaattagctgggtgtggtggcacacacctgtagtcccagctactcaggaggctgaggcaagagaattgcttgaacctgggaggcggaggttgcagtgagctgagattgcaccattgcattccagcctgggcaacagagcaagactctgtttaaaaaaaaaaaaacaaaaaaacaaaaaacttaacaaaaggaagaggtgcatagggctggatccaggagagatcgggtggaagcctgcaagtgtcctctcccagtggggttgtgtggacagcctttatttctcccagcagggatgtgtggcaaaacacacaaagtgctgccaactagagaagctgacccaagcctttctagccagggtgtttatagagagtcaactacatacacctggctgactgtctgcatggcttttcttagcctccagcccctgcacagatcaagctgatgccacgtggcccaagttccaaccctaagtcacgttgtgagtgttattagtccattctcatgctgctatgaagaaatacccaagaccgggtaaattataaagaaaagaggtttaattgactcacagttctgcatggctggggaggccccgggaaatttataatcctggcggaagccacctcttcaccaggcagcaggagcgagaagtgctgagcaaaggggggaaagccccttataaaaccatcagatctcgtgagaactcactaccacgagaacagcatggaggtagccgcccccatggttcagttacctcccactgagtaccgcccacgacaagtggggttatgggaactacaattcaagatgagatttgggtggggacacagcccaaccatatcagttagcatagactatctggcatgacccacatagacactccagccaggatgctccaagagtttagaagttaatcccaggagccagggaaggaccaaacttttctttagaatgtgtgggatttatccttgaccacacagtttttttgttttgttttgtttttgttgttgttgttgtttttgagatggagtctcgctctgtcgcccaggctggagtgcagtggcatgatcttggctcactgcaagctccgcctcccagggtcactccagtctcttgcctcagcctcccaagtagctgggactacaggcgtctgccaccacacccagctaattttttgtattttttagtagagacggggtttcaccatgttagccgggatggtctcgatctcctgacctcgtgatccacccgcttcggcctcccaaagtgctgagattacaggcgtgagccaccatgcccagctgaccacacagttttatacaaatctataagatggcctggccacatgccttactacccatgtgacccaggaagctccaagctaagaaataaacatcaaaaatggccttagaccagtgctgcttaaggggcactgagtaaaagttctcaatgtatttctgaaaagaccacctcaacccaagctctctggagatgagttcacatatacagacagaaaacacaaggaaatcatccaccatgagcaaaagacagcagagacaacaaacagcagaattagatcttgcctggagatccttaggtggataagatataataagcatgttttaacaattaaaaacacaaaagaaggaattgtaagaagcaatagatgaatggatgaatggataggtggataaatggatggatggatggatgagtggatggatggaaggatgtttggatgatgggtggatagatagatgaatgaatgagtggagggatgggaggatagatggatgataggtggatggatggatggataaatggatggatggatggatgggtgaaggttgactgtgtggatggatgagtggatgaatggatgggtggagggatggaaagatggactgatggagagatggatgggtaggcatatggatgggtaaatggtagatgaatggttggttggatgaatggttgggtagatgaatgggtgggtggatggatggatgggtagatggatgggtgagtgggtgggtgggtggatgagtgagtgactggatgggtgggcagatggatgaatggatgggtgggtgggtggatggatggatggatggatggatagataggtggatggatgggtgcatggatgggtggatggctagatgtgtgggtggttgtatggttggttggatgcatggatggatggctagatggatgagtgggtgggtggatggatggatggatggatggatggatggatggacagatggatgagtgggtggatggatgggtgggcagatggatcaatggataggtgggtggatggatggatggatggttgaatagatggatgagtggagggatggatggatgaatggatggatgtgtgggtgggtggatgggtggatggacggatgagtgagtggctggatgggtgggcagagggatgaatggatccctccattgagtgaatggatgggtgagtgagtgtgtggatggatggatggatggatggatggatggatggatgggtggatggatagatgtgtgggtggttgtatggttggttagttggggggtgggttgaagcctccctccaggctgattgaggttgccagtctccagggcctgttctgctgaggcaccaggaaggaggccctcagagccacacttagaaagtgggtggcaggagccgggccctgaagggcatgtgccactcttgctgctgggagttcacccacgctgggtgggatcattgttttggattacatacatgtagaagcgcattttgcacttttaacattaacagcaataacttggcctgtgtctttccctccctagcatgtcctgaggcgacgtgagcataacaaaggacatggaagaagattccagatgccagaaaacctctgtcagacgcccactggccccagatctcatcctgcctcatcctgagtcccaatcttccaagggtgccagcccctccgttcatctctgaaacccagcatccttttcagctgcttgaaaacattgtattttttttttttaacgatgcagtatttgtgcgttccagaaaagggcccagctctgagcccctcacccttccacactcacgaactctcagccgaggaaggcaagaagcgcagggggtggcccgcgtggcgtcggtggcctccgctcctgctcgcagcctctgtggtcagagctggatacaagattcaagacccttctcttgcttgtcacccgctccaggttggagccacagacacccaccgccaccccggctgggtctgcgtcctttcctgtgcctttccctccagaatgcggcctcagacctagaagctcaacccccctatgagggccacgtcctggggtagctcctgacctccgaccttatgtccaaatttcacacccatggtttttcatttgacccgcccccttctcgctcataatgacacccagctcctttgagaggatcagagcccattgcacaagaagagccgctgccaaccatccttgtcctccgattgcaaaatgacaccccagtaatctagaacattctcaagcccctttaactcagatgtcaagccaccgggcaaaccccgtcaatacctcccaccaaggaatgagatatgtggacctcactgctcccccaacccagcgtcaggctgggacacgccaacgctgttccgggttggaacagcagaggctcagaaactggctctgaaataggcagacctagcaagaggaagatacagggtatcgggcgtttgagtgtttcagaagtcattcgggaagataaatccagtgcgctggccgcagccacctgcattcaaagcttggaccagcgggttcttgttcgggaggcaaatttccctaggaaaaagaagacagacttttctaatgtggtccaaatgcggatcactggtcagatggactctagaagcactgagctccctgtctctggaagtatttaagaaaaggctgggccaggcacgatggctcacgcctgtaatcccagactttgggaggccgaggcaggcggatcacctgaggtgaggagtttgagaacagcctggccaacatggtgaaacctcatctctactaaaaatacaaaaattagccaggcgtggtggcaggtgcctgtaatcccagctacttgggaggctgaggcatgagaatcacttaaacctgagaggcagaggttacagtgagccaagatcgtgccactgcattccagcctgggcgacagagcaagactctgtctcaaaaaaaataaaaaataatcagggcacagtggctcatgcctgtaatcccagcactctgggaggctgaggtgggtggatcacctgaggtcaggagttcaagaccagcctggtgaacatggcgaaaccccgtctctaataaaaatacaaaaattagccgggcatggtggtgcatgcctgtaatcccagctactcgggaggctgaggcaggagaactgcttgaacccaggaggcagaggttgcagtgatccaagatcatgccactgcactccagcctgggcaacaagagcaaaactccgtctcaaaataaaaagaaaagaaaagaatggacagtgtttgcagagagttgctcacgagtttccctctaatcctaaatgtcttcatgtctatcagtctgagcagacggtgagtagggcgggcacattctccaggcccttcttcctagctctgtggttgacctctcagcaagtgctatccaggctgggccaaccagacccacaattaactgagcctcagtgaaagcgtccagtgcatcttgacctgagacagcaaggaattgcatttggggttattccaacgatgatggcagggaactggtggtatttagtgctgaggggcagtgatacagaaagatttgccctgtgggacagggtcctgcgcgagtcccatccccaaaagccagcagctcctgccatgaggaagacggggtttctgagcaggcttatgcctgcaggttcctgtggagccaccggctgtgacgggacacctctgggtctcagcattgccctggggaggctgggacatttagggacatggtagggttttaacatttgtttcccaaatgtcaaatcccgggcacaggggcaagaccctgtcccgaattcccaccccagtgaatggtgtcgctgccaaagccaacacaagatgacaaaagtggctgggtacggtggctcacgcctataatcccagcactttgggagaccgagacaggtggatcacctgaggtcaggagttcgagaccaggctggccaacatggtgaaaccccatctctactaaaaatacaaaaattagctgggtgtggtggcgcgcacctgtagtcccagctactcaggaggctgaggtagaagaatagctggaacccaggaggcagagattgcagtcagccgagattgcaccactgcactccagcctgggagacagagcaagactgactcaaaagaaaaaaaatgacagaagcctgattatcagactgcccggaggagacaggctccagcagatagatgccagccaggcccagctgccacgatttgtcccaggtgaccaaaggcacgcagctccagcatgaatcgttctaacccaacagtgacaagaactgctgggccttaaccgtcatggaagactggggccgcttccaagtcacagacaggagacggggacaggaaagaactcattccacccaatcggacacctaataattgagtgtctacagcagcaatcaagtgacaagtgaggccctacctgacccagaaggtgcctgccggctaaacattctgcccccaccagaaactccagggggtccgcccgttatgccgtggcccacccacgcccctttggatcaccagcagtcacagacaacaggcaggcgaaactgaagaccccaactcagccccagcggaccctccagagcaaaagaggcccccggcgaggccacctgtcggcaggcatgccgaggtcaaacagccggggccaccgttcccagctgggccacgacctgcaccgtccacagatgggctttgagatggatttgtatcagggtggggggtgtggtttggccaaaatgcaatggaccccgacccctcctcgtaaaaggatgttgggtttccctctggtgacacatgggatgcgtcataaaccctcccccaaagtcctggtcagcagcccatccttccaacgatgagttttgcggtttttcagaacagaaatgatcactacgattgacgacggtcgtgatgttaagacgtcgtctccatgagctttggggggacttttatgtggaataaagaaactatcactgagaagggaggtttgttccttttgagtactagtaacaggcagggcccagtggctcacccctgccatcccagcactttgggatgcggaggcgggaggatcacctgaggtcaggagttccagaccaacctggccaacatggtgaaaccccgtctctactaaaaatacaaaaattagccgggcgtggtggcacacgcctgtaatcccagctactcaggaggctgaggcaggagaatcacttgaacccgggaggcagaggctgcagtgagccacgatcacgcctgccagttctctccatccacccagtggggacactgtgcggtggccatgtcatacccaccttgatgtctctgtcaccagcaggtcccaaagtcatgctactgtgctccagttgtgtttatgccggcaggtgccctttaggggaaaaggtggggtcttcgtgggtggatggaggggacaaagagggtggagctggtgctgggatcctggggagccgctcccagtttggaggtgacagccccctcctttatcctactgcacggggtctctgattaccctgagaggtttcttgaaaaccccattcacggccaggcacggtggctcacgcctgtaatcccaacactttggaaggccgaggcaggtgaatcacttgaggtcaggagtttgaggccagcctggccaacgtggtgaaaccccgtctctactaaaaatactaaaattagccaggcgtggtggtgcgcgcctgtaatcccagctactcgggaggctgagccaggagaattacttgaacccagggggcgtaggttgcactgagccgagatggcgccacttcactccagcctgggcaaaagagactccgaaccccccaccaaaaaaaaacagaaaagaaggccgggcgcggtggctcacgcctgtaatcccagcactttgggagtccgaggcgggcagatcacgaggtcagaagatcgagaccatcctggttaacacggtgaaaccccgtctctactaaaaatacaaaaattagcccggcgtggtggtgggcacctgtagtcccagctactcaggaggctgaggcaggagaatggcgtgaacccgggaggcggaacttacagtgagccgagatcgtgccactgcactccagcctgggtgacagagcaagactccgtctcaaaaaaaaaaaaaaacaacagtaaagaaaacctcactcgctctttcattcatttcggggcacagggggtccagtccctcacaccactcccagcccaaggggtgggctcaacccagggacctggggccttcctggggaccaggaggaagggacctttctgatcagagaactaatacacaagcagccgtcagccaagccagcaggaggaggggtgtccccggcagagtgacccacggggagcaaggcctggggcagccagagaggggcctgagggccggatcggcgccaccagtgttgcagaaaaacccaggacgaaattaaagtcttcatcatttggtcactttctttttattatcataattacttttttttttttttgagacggagtctcactctgtcacccaggctggagtgcagtggcacaatctcagctcactgcaacctctgcctcccgggttcaagcaattctcctgcttcagcctcccgagtagctgggattacaggcgcgcgctaccacgcccggctaatttttgtattaagtagagatggggtttcgccatgttggccaggctggtctcgaactcctgaccgcaggtggttctcctgctttggcttcccaaagtgctgggagtacaggggtgagccaccgtgcccaggcttttttttttttttttaatcagggttttcctctgttgctcaggctagagtgcagtgatgcaatctcagctcactgcagcctcaacctcctgagctcaagggatccttctgcctcagcctcccaagtagctggtactacagaagcaggccaccacacccagctaattttttttttttttggtagagatggtggggggcaaggaggcgggggtctcacaacgttgcccagactggtcttgaactcctggcctcaagcgatcctcccaccttggcctcctaaaatgctgggattacagtagtgagccactgcaaacatttctttttttgagacggagtctggctctgtcgcccaggctggagtgcagtggcgccatctcggctcactgcaagctccacctcccgggttcatgccattctcctgcctcagcctcctgagtagctgggactacaggcgcctgccatcgtgcccacctaattttttgtatttttagtagagacagggtttcaccgtgttagccaggatggtctcaatctcctgacctcgtgatccgcctgcctcggcctcccaaagtgctggggttacaggcgtgagccaccgcgcccggccaaacagacacttttttaataaatcaagatgagagtcacttaatataaaattaaccatttttttgttttttcattctttttgagatgtagtctcactctgtcgcccaggctggagtgcagtggcgcgatctcagctcactgcaagttccgtctcccgggttcacgccattctcctgcctcagcctcccgagtagctgggactacaggcgcccgccactgcgcccagctaattttttttttgtatttttagtagagacggggtttcaccgtggtctcgatctcctgacatcgtgatccgcccacctcagcctcccaaagtgctgggattacaggcgtgagccaccatagcatacccggcctaaaattaaccatttttaagagtacattcttcacaatgttttgcaaataccacctctattaaattccagaacattccattaccccaaaagtaaatctgtccccagcagccacagtcatccccacccacctcccccagcccctggcacccacgcgtccccttcctgtcctcgtggattgacgtgtcctgggcatttcatgtaaatgggatcactgcaccgtggggcagtgaggtcgctaatcaataccctgggacctgggactgcttggggactggcaggcatttgtagcccctgtggcttctccctctccttcctgccggggtgggctggcacagggaggcctcccagaggtgccctgccagggcctttatctgggcatgtcactgtcacctgaggccctgggccacgtgccccaccaagaggctgccaggaaattcttgccaccgaaactgggccagaggtgaagcccaggagccgggctttcctgggtgcctgcttgagcacctggaggagctctggccacagacatagccaccccgctgcactgccacagatcctgtggctgactgctttttctgagctttcctcatgaataccccaagatttccagtccattttgcaaaagctcttgaagtccagggtcacaattctgttaacaggactcataaagtacatcattggtcgggcgtggtggcttaagcctgtaatcccagtactttgggaggccaaggaggaaggatcacttgaggccaggagttagagacccgcctaggcaatgtaacaagacctcatctcttaaaaattctctctctctttggtgtattgatctcttactgcatacagacatacaaacttggccatcctatcaccccaccttcctagtcacttcccatcctctgatcacccccctgctcctgggctataatttcccacttttccttgtattggtggaaagggagaagattgaattcaatctccctcccatactacaaaaccccatggtagtagtccctcacccgcctcaacaaagtcagccttactgttttaagaagcatcagaaaaattattttctggtggggagaggcgtcacatgcctgtaatcccagcactttgggaggccgagttggaggaatcatcacgtgaggccaggagttcaagaccaacctgggcaacatggcaagaccccatctctacaaaaaattttaaagttaggtgtggtggtgcgaacctgtagtctcagctgctcgggaggctgaagcagaaagatcgccccagtgtgagaagttgaggctgcagtgagctgtgatcacatcaccacactccagcctgggccacagagcgagaccctgtctcaaaaaattcaaaaatgtaggctgggcatggtggctcacacctgtaatcccagcactttgggaggcctgaggcgggcagatcacctgaggtcaggagttcaagaccagcctggccaacatggtgaaaccccgtctctactaaaaatacaaaaattatctgggcgtgttggtgctcgcctgtaatcccagctattggggaggttgacgaaggagaattgcttgaacctggaaggcagaggttacagtaagccaagatggtaccactgcactccagcctgggtgacagagcaaaactctgtttcaaatttatttatttttattttattttattttatttttttgagacggagtctcgctctgtcgcccaggttggagtgcagtggcacaatctcagctcactgcaacctctacctgccaggttcaaacgattctcctgcctcagcctcccaagtagctgggactacaggcgtgtgccaccatgcccagctaattttttttgtatttttagtagagacggggtttcaccatgctggccaggctggtctcgaactcctgacctcgtgatccgcccgcctcggcctcccaaagtgctgggattacaggcgtgagccactgcacccggctccatctgaaattaaaaaaaaaaaattaaaacatttaataagagaatactttttccctttaccagtagaagagagaagcagcagagtgtcattcctccccattaccccctccccgccccgccggcccccagtcaaatgactccacccacaaggcaggcacgggatgaatggtccctggtgtcacgctgagatcctgtggctgggcccccggtcacctgggcaaggctatcttgtgattcactgctaaggatcttaagcccaccttggccctgacctcgttggaaaacgaagctccccgcagggtcccggcctctagggctgctgtgcgggcgggggtgggtgagttcgcttccttgacgccacgagaaccagtcttaatgtcagggtcaggccataggacacagagagcgggatatttttagggagggaaaagtgtggggctgctgatctgagctctctggccaggaggagggaagagggtgggggtggagaggagggaggagggggtaagaaggggaggagaggggaggagggagtggagagagggcagggaggtgggaggagggaagaggcagccccctgcccggccagctcgtgactaatttaggcaaaaggcagcctggagctatttccattcggcggcgggaacaggtgccggcgcctccgccccatccccaggggccgcctcccccggggcggcctccaggctgccgagacctataaaggcgccaggttttctcaatgaagccgggacgcactccggagcgcactgcgtggtcgcaccctacccgggctgccttggaagtcgtccccgccgcccctccgcaccggcatgaagctcatcgtgggcatcggagggtgagcgccgggggacctggtgggcggccctgcggggcaaagccccctgtgcgcgcagagggggaggcccgggaatgaatggagggatgcctggcgcctgaggtcacctacacgccgcccgaggtcagagtgcagggaggattttctgccctgggggtctcggtgtccccagtgggaaggggggctggacactgagcccagtgtttcattttttaaatggaaatgattcccgccaccttccaattatactcagcataaaaaaaaaatagaccagacacggtggctcaggcctggaatcctggcactttgggaggccgaggcgggtggatcacctgaggtcaggaatttgagaccagcctggccaacacggtgaaaccccgtctctactaaaaatacaaaaattagctgggcacggtggtgcatacctgtaatcccagctactggggaggctgaggtgggagaatcgcttgaatccgggagatggaggttgcagtgagtgcgatcatgccacttcactccagcctgggcgacagagtgaggctgtgtctcaaaaaaaaaatcagtagggacagaaaattaactaaagctccagtgaaccctcctcccgcctcgtggctgtcctggctaaatcggggactgacacgtgggcaggtgggatggggtccccaaaatgtcattccacatgactgtgcctttggagcctctctcaggcgacctcaggctagaagagattcaaactctctgtaaccagcacggctggctttgtggggctcacacccccgcctcagaagggacgggagcttggtctaatgctagccggactccctcttgaatttcatattttttgttttttggggtttttttttttggggggggggtgttgttgttgccgtcgtagtttgagacagagtcttgctctgttgccccaggctggagtgcagtggtgtgatctcggctcactgcaagctccgcctcccgggttcaagcaattctcctgcctcagcctcccaagtagctgggattacaggcgtgaaccacatgcctgtctaaactttgtgtttttagtagagatggggggtttcaccatgttggccaggctggtctcgaactcctgacctcaagtgatccaactgtctcagcctcccaaagtgctgggattacaggcgtgagccaccgtgccctgcccctaatatttttcgagtaagaagcctcgaattttcattttgcactcagcgctgcaaatgtcacagcccacccggggcacaaaataacttggattcatgtcaggcactttctttttatttttatttaaaaaattattaatacctgggggcttacattttaaaaattgggttttaaattttataatacagatgggagtctcactatgttgcctaggctggtctgaaactcccaggatcaagtaatcctcctgcctcagcctctccaaatgctgggattacaggtgggagccaccacacctgagcaacattaggcatttttctaacctgcctcttctggatatgatataggtgtcctctttttccgtcagtcttttttttttttttttttttttgagacaaaatctcgttctgtcaccaaggctggagtggagtggcacaatctcagctcactgcaacctctgactcctgagttcaagcgattatcttgcctcagcctccctagtagcttggattataggcacccaccactacgcccagctaatttttgtatttttactagagacagggtttcaccaggttggccagtctgatcgcaaactcctgacctcaggtgatctgcctgcctctgcctcccaaagtgctgagattacaggcatgacccaccacgaccagctaaaattgtttatattatctatttatgtatttatttatttatttaaagacagggtttcactctcacccagactgaactgcagtgaggtgatcacagctcactgcagcctcgaactcccaggctcaggcgatcctcccatctcagcctcccaagtagctaggactacaggcatgcaccaccacacctggctagtttttaattttttgttaagatggggtcttactatgttgcccaggctagtcctgagctcaagcgatccacctgcttcggcctcccaaagtgctgggattacaggcatgagccaccgtgcatggccggtgctgttttatttttttaagccctgctgagactaaatcaatttccttatctgtaaacataggtgggccgggctcacacctgtaatcccagcactttgggaggccaaggcaggcggatcaccagaggttaggagttcgagaccagcctggccgacatggcaaaaccccatcgctattaaaaacacaaaaattagttgggtgtggtggcgcacgcctgtaatcccagctacttgggaggctgaggcaaaagaattgcttgaacctgggaggcagaggttgcagtgagccaagattgcgccattgtactccagcctgggcaacagagtgaaactccgtctcggaaaaaaaaaaaagaaagaaaccctgtctctactaaaaatacaaaaattagccaggcgtggtggcgtgtgcctgtagtcccagctactcaggaggctgaggcaggagaattgcttgaacccgggaggtagagcttgcagtgagctgagatcgcgccactgcactccagcctgggtggcagagcaagacttggtctcaaaaaaaaagaaaaagaatcagaaaaatcctgggagctgatttgcaggaagaccctgagacatggacaggccccggggagcccaggctgcacctcaggcccccttctgagcaccctgaccttcttggggggagcccaggcagtctcatgcacacgctgtctccccagcatgaccaacggcggcaagaccacgctgaccaacagcctgctcagagccctgcccaactgctgcgtgatccatcaggatgacttcttcaaggtgcccgcccttgcccggggaggtggagctgagaggggatgcagggtgggcagccaggcccggccagccccgccctccactgcccagtgcccgtgtgggctgggcactggctccactccctgcctgacccctcctggggtctctgggataaactgggccaggaaagtgagggacgggtgtcgtgttcccatttcctaagcacctatttcatacgcagcccattctcactggacatccctacagtggggaccccagttagatggatgggaaagccaccattcctccacagggccagccggctgtggctttctgggtgaataccctttattcctctccacctcccctttcccatctgcaaaatagactctgagcccagctcgctgtgtgggtgtgggtgggggtgagggctaatgagatgattgatggtctggggaaaatctgagggtcaggcagagcccccacgcctcagggacctcagcagctccagcaagggaccccctaagactccatcacccaggccgggggtgaggcaggaccgggcactgagcccgaggttcaggctcctctgtttcagccccaagaccaaatagcagttggggaagacggcttcaaacagtgggacggtaaggacaagcatcacctccaagccccactatcccccggggtccgccctcctgcaatgcccgctccccctccactattcccccggggtccgccctcctgcaatgcccgctccccctccactattcccccggggtccgccctcctgcaatgcccgctccccctccactattcccccggggtccgccctcctgcaatgcccgctccccctccactattcccccagggtccgccctcctgcaatgcccgctccccctccactattcccccggggtccgccctcctgcaatgcccgctccccctccactattcccccggggtccgccctcctgcaatgcccgctccccctccactatcccccggggtccgccctcctgcaatgcccactccccctccactattcccccggggtccgccctcctgcaatgcccgctccccctccactatcccccggggtccgccctcctgcaatacccgctccccgtccactgtccccccggggtccgccctcctgcaatacccgctccccgtccactgtccccccggggtccgccctcctgcaatgcccgctccccgtccactgttcccccggggtccaccctcctgcaatgcccgctccccgtccactgttcccccggggtccaccctcctgcaatacccgctccccgtccactgtccccccggggtccaccctcctgcaatgcccgctccccctccactgtccccccggggtctgccctcctgcaatacctgctccccgtccactgtccccccggggtccaccctcctgcaatacctgctccccgtccactgttcccctggggtccgccctcctgcaatacctgctccccgtccactgtccccccggggtccaccctcctgcaatgcccgctacccgtccactgttcccccagggtccgccctcctgcaatacctgctccccgtccactgtccccccggggtccaccctcctgcaatacccgctccccctccactataccccggggtccgccctcctgcaatgcccgctccccgtccactgttcccccggggtccaccctcctgcaatacctgctccccgtccactatcccccagggtccgccctcctgcaatgcccgctccccgtccactgttcccccggggtccaccctcctgcaatacctgctccccgtccactgtccccccggggtccaccctcctgcaatgcccgctccccatccaccgtcccctggggtccgccctcctgcaatgcccgctccccgtccactatcccccagggtctgccctcctgcaatgcctgctcccctttccccagtgctggagtctctggacatggaggccatgctggacaccgtgcaggcctggctgagcagcccgcagaagtttgcccgtgcccacggggtcagcgtccagccagaggcctcggacacccacatcctcctcctggaaggcttcctgctctacagctacaagtaaacatctgcaggctctggccccaggcatggccctctctgggcgggtatagccatctcttgtttttttttttttttttttttgttttgtttttttttttttttgagacaagagttttgctcttgttgcccaggctggagtgcagtggtgagatcctgactcactgcaacctctgcctcccagtccaagcaattttcctgcctcagcctcccaagtagctgggattacaggcctgcgccatcacacccggctaatttttgtatttttagtagagactgggtttcaccctattggaccaggatgttctcaaactcctgacctcaagccatccgcccgcctcggactcccaaagtgctgggattacaggcgtgagccaccacgcctggctcacatctccattttaatagtcaggagacccaggagcagagccaccacgggaagtcaggagttgggggcagagctgggatcaacccaagtctggagccaggcgtggtggctcaccagcactttgggaggccaagatggatggatcacctgaggtcaggagttcgagaccagcctggccaacatggcgaaaccctgtctctactaaaaatacaaaaaattagccaggtgtggtggcgtgtgcctgtaatcccagctactcaggaggctgaggcaagagaatcgcttgaacccgggaagtggaggttgcagtaagccgagatcgcaccactgcactccagcctgggcgacagagagagactccatctcaaaaaaaaaattaaaactaaaaactcaagtctgggacaaacagccacccttcttggggagactgagtctttcttctggaacctcagacttctcgggcagaccagtaacctaggctgcgccctctggcttcactgtgtggccctgagcaagacattctgtctgtctgtgcccgtccaagttggagaagaagcgtgattcaattttgtggggggctgctgcagggatgttggccaattcagcttccctccctgacccctaaactcactggcccagaccaccccatgtgctcgccaccctctgaaagccaaggctggggggttggatattttgactgcggttgaaggaaagctcacaggtgctgaccgtgtctcccccactccgcccaggcccctggtggacttgtacagccgccggtacttcctgaccgtcccgtatgaagagtgcaagtggaggagaaggtgcacttggtgtctgggggtgcggtgggctcctgagggccctgtcttgaattactgggtggaaccagcggtaacctagaaaatgccactgggggctgggcacagtgtctctgggctgtaatcccagcacttccggaggctgaggcaggtggatcacctgaggtcaggagttcgagaccagcctggccaacatggtgaaaccccgtctctactaaaaatacaaaaattagtcgggcgtagtggcgtgcacctgtaattccagctacttgggaggctgaggcaggagaatcgcttgaacctgggaggcagagctgagactgggacactgcactttagactgggtgacagagggagactctgtctcaaaaaaaaaaaaaaaaaaaaaaaaaggcggccaggcgcggtggctcacgcctgtaatcccagcactttgggaggcttgggcggatcacctgaagtcagttcgagaccagcctggccaacatggtgaagccccatctctaccaaaaaatacaaaaattagggaggccgagatgggcggatcacctgaggtcaggagtttgagaccagcctggccaacatggtgaaacctatctctactaaaaattgaaaaattagccaggcatggtggcgggctcctgtaatcccagctactcaggaggctgaggcaagagaatggcttgaacccgggaggtggaggttgcagtgagccaagatcaggctactgtactccaacctgggcaacagagcgagattccatctcaaaaaaaaaaaaaaaaaaagagaaaacgccactggacacgggccacatcccaacgccacaggcactggccacttagctggctggagctctgtgccaggtgcccagagcctgaggcctggatagcacggcccaccccaaccctgtccagggcatctcccggacccacagggtgaacatgccggaggttggagcctctagcccagggcttctgaccgagggtccccttgctcagaggttctgtccctgactatgacagctttcaggccccccaccgggggtatattcttagcatcacccttctgtgctctaagccatccttgccttctccctctgcagtacccgcaactacacagtccctgatccccccggcctcttcgatggccacgtgtggcccatgtaccagaagtataggcaggagatggaggccaacggtgtggaagtgggtaagcccctgagcatgaccaggccttgccccgggcgggcgggggggaccctgggcccagcccctctccatctttttttttttttttttcaagacagagtctcactctgtcacccaggctggagtacagtggcacgatcttggctcactgcaacctccgcctcccaggttcaagccattctcctgcctcagcctcccaagtagctgggattacaggcgtgagccaccacactcggcccctaatttgtgtattattaatagagacagggtttcaccatgttggccaggctggtctcgaactcctgaccttaggtgatctgccctccttggtctcccaacgtgctgggattacaggcgtgaaccactgcagctggccaccattctaaacgcccttcagtactccccactcaggacctttggaaacctggacattcctccgtgagcctcgcccccagtccctcttgctatttttgttgttgttgtttagacggagtcttgttctgtcgcccaggctggagtgcagtggcgcgatcttggctcacggcaatctccgcctcccgggttcaagcctttcccctgcctcagcctcctgaatagctgggattacaggcgcgcgtcaccacacccatctaatttttgtatttttagtagagatggggtttcaccctgttggccaggctggtttcgaactcctgacctcgtgatccgcctgcctcggcctcccaaagtgctaggattacaggtgtgagccaccgcgcccggccccctcttgctgttggtccaggaaactgactccagcagcccgactctgcagatctccttgctcctgacccagccgtccactcgtccccccgtgctctggcccccttcctcccggcagccctgacgcagcctttctgatttcagtctacctggacggcatgaagtcccgagaggagctcttccgtgaagtcctggaagacattcagaactcgctgctgaaccgctcccaggaatcagccccctccccggctcgcccagccaggacacagggacccggacgcggatgcggccacagaacggccaggcctgcagcgtcccagcaggacagcatgtgagcgtttccctatgggggtgtctgtacgtaggagagtggaggccccactcccagttgggcgtcccggagctcagggactgagccccaagacgcctctgtaacctcgctgcagcttcagtagtaaactgggtcctgtttttttaactgttggtgtctaccgtgttctgtctaagatccgtcaggccaggtgcagtggctcacgcctgtaatcccagcagtttgggaggccgaggagggcggattgcctgaggtcaggagttcaagaccagccaggccaggatggcaaaaccctgtctctactaaaaatacaaaaattagccaggcatggtggtgcatgcctgtaatcccagctacttgggaggccgaggcaggagaatcgcttgaacccgggaggcagaggttgcagggagccgagatcgcactactgcactccagcctgggtgacagagcaagatccgtctcaaaaaaaaaaaaaattaaaaattagctgggcatggtggtatacctgtgtagcctcagctacacaggaggctgagacaggaggattgcttgagcccaagaggttgaggctgcagtgagctatgatcaggccactgcactccagcctgggtgacaatgcgataacctgtctcaaaaaaattttttttctcaatgcctataaataaagttttattggcacccggcccctgccatttgtacgtgtcagccctgtggctgctttagtactacaatagcatgttgagtcaccctgacagagaaggtctgtctgcaaagccaaaaatatttactatttgcccctctgtgcaaaatgtgtgctgaacggtgtggtgtatgccaggtcgagtccagggccacagggagggtctgaggtctccgtgctggaggggaagcaggagtggatatggaatgggaggatgacgtggaagaggtggcttgccaaggcttctccttccccataagcacagagtgtggtaaggatgatctgccggtcactgtgcccaaaatagtccaggacaggacagagacatgagggaggtggttccaggacagcagaagccctgcctggcagcccagataccttgggcattattgttcttttaaaaaaaaaagaaaggttcatgcctgtaatcccagcactttgggaggttgaggggggaggatcacttaagccccggagttccagtccagcctgggcaagatagtgagacccccatctctacaaaaaatgataaaatattagcaaggcgtggtagcccatgcctgtaatcccagcactttgggaggccaaggaggtgaattgcttgagcccaggagtttgaaaccagcctgggcaacagagtgagaccccgtttctgtttttatttttctgtatttatttttacttagttatttatttttgagatggagtctcggtctgtcgcccaggctggagtgcagtggcgtgatctcggctcacggcaatctccacctcccaggttcaagcaattctcctgcctcagcctcccaagtagctgggatcacaggcatgcaccaccacgcccagctaatttttgtatgtttagtaaagacggggtttcgccatgttggccaggctggtctcgaactcctgacttcaggtgatccacccgcctaggccccccaaaatgctgggattacagacgtgaaacaccatgcccggctgtgagaccccgtttctacaaaaaattagccaggcatgatgacacatgtctgtagtctcagctactcgggaggctgaggtgggaggatcccttgagcccagaaagttgaggctgcaatgagttatgattgcatgactacactccaggctgggcgacagagcaagaccctatctcaaaaaaaaaaaaaaaaaaaaacaaaacaagaaggggaacagtagccacagggtaaccaaccaaaaaacggaagatgataagggttggccaggatgtggagagagcaaaacccttatgctctgaggtgggaaatggaacacagtgagcctgacgagaaacagtctggccgtttctcagaattaaacatggaattaccatagggcctagcaatcctgctcctgggcaaggccccaaggaattcacagcagggactcaaagagatccttgcacagccatgttcatgggggcacagcccacaacagccaaaaggtagaggcaacccaagtgtccacagacagatgaatgaatgaacacaatgtactccatccgtacatgaatattactgagccatgaaaaggaagggaatctggacacagggcacaacaggatgatccttgaagatgtcacgctccgtgaaataagccaaggccgggcatggtggctcacccttgtaatcccaacactttgggaagcggagaggggtggatcacctgtggtcaggagttcaagaccagcctggtcaacatggcaaaaccccgtctctactaaaaatacaaaaattagctgggcatggcggtggcgtgcctgtagtcccagctacttgagaggctgaggcaggagaatcacttgaacccaggaagtaaaggttgcagtgagccaagattgcgccattgcactccagcctgggcaacagaacaagactccatctcaaaaaaaaaaaaaaaaaaagggaaggaagggagggagggagggagggaggaagctgggcgtagtcgctcacacctgtgaatcccagcactttgggaggctgagactggaggagccaaggagtttgagatcagcctggacaatatagcaagaccctgtctctacttttaaaaaaaatactggggggctagagcagtggctcacgcctataatcccagcactttgagaagccaaggcaggaggatcgcttgagcccaggagtctgagaccagactaggcaacatagtgagaccctgtttctttttttaatttaaaatgttattcttggccgggcacagtggctcatgcctgtaatctcagcactttgggagaccaaggcacccagatcacttgaggttaggagttcgagaccaacctggccaacatggtgaaaccccgtctctgctaaaaatacaaaaattagctgggtgtggtggtgcacacctgtaatcccagctatttgggaggctgagacaggagaatcacttgaacccaggaggcggagattgcagtgagccaagattgcaccactgctctccagctggggtgacagagggagattccatctcaaaaaaataaatttaaatttaaaaagtaaaataaaatatttttaattaaaacaacttttttggccaggcgcggtggctcactcctgtaatcccaggactttgggtggctgaggcaggcagatcatgaggtcaggagtttgagaccagcctggccaacatggtgaaaccccatctctactaaaaatacaaaaattagccgggcatggtggcacacgcctgtaatcctagctacttcggaggctgaagcaggagactagcttgagccagggaggcagaggttgcagtgagctgagatcacgccactgcactccatcctgggcgacagagcaagactctgtcttggggaaaaaaataataatgattaagatggcaaattttgctttgtgtgttttgctaaaagttaaaaaaataggaacaggagcactagggtagctagctcatcccagttggcccagaacgttcctggtgttaccactcaaagtcctgtgttcccaggagaaacaggaggatgagtcacccttatgggagccaatcagcttgagaagtcagattactccatgacccattcttatagggctcagagagggaaagaaacttgcccaaggtcacccagcagagctgatatttgaactcagctctgttgaatgccaaccccctgaccttctccagccccatgtggccttccatcttcacactcgcctgctgggaagaccccctctcccctcccagagccatctaaggggcccagagaatcccaccccaacattgcccgagtacagctggattctgggtgcagtgatggtgtcggttaacctctgcctgtctcgcggctcctgccctccacaaacagaaccagtgactcattctccccaaatgcaaagcagatgcacctgtaatttgtccccctaggagtacccgtccatcagcgacagggacagggcaccccgagaccaggcagccccgggtgcaggtgggcagctccaggacccagcctgctcggcccaaacccaggcagcctctgccacttcctggcccactgtccccaggcaggtaaaacgccgtctctgtgcctcagttccctccctcgtgtgctcagcgtagcaccaggcgcttggagttatcacagctgctgggttgatggctggtgtcgctatgcaccacagtgacaaaccgaggcaggccccgacccacaggccagcccgatgggcacagtgagcgggatccacctgccaggtgtctagcagggcttggaattctccccagcaccccgagagagatgcgtgcaactgactcctttttgcagatggggaaactgaggctcgggaagtggatttgcttacccaagaccacacatgaaaggtggaatcagggccaggtgaggtggctcacgcctgtaatcccagcactctgtggggccaaggtgggtggatcacctgaggccaggagatcgagaccagcctggccaacatggtgaaaccccgtctctactaaaaacacaaaaattagccaggtatggtggtgcatgcctgtaatcccagctactcgggaggctgaggcaggagaatcgcttgaacctgggaggcggaggttgcagtgagccgagatctctccattgcactccagcctgggcaccatgaccgaaactccatctcaaaaaaaaaaaaaaaaagaagaaaaaggaaaaaagggggaataaggatacgagtccaggtggccgagcctgggaacctgagccaggtccactgtcccatgcctgggcccagtgtcagggtaccatcacctcgggaatcctcgttcccccagaggagacccctcctgctcctgtgtgggacccccctccatcacctccaacttcctggaatcccctcagggtcccgccagtcccccagggctttctggtcccctcagcggaggccctagtccccagcaaccacccccttggctggatgcttctgaagtccctcattctcctcctgcactcacaatgggggccacagacacccccacacacaagcttgtgttctttctctctcttttcttccctccttccttcctctcttttctctctttctctctctctttctctctttctctctttctttctttctttcttgacagagtcttgctctgttgcccaggctggagtacagttgcgcaatcccggctccctgcctgcaaccgccgcctcctgggttcaagtgattctcctgcctcagcctcccgagtagctgggatcacaggcgtgcaccaccacgcccggctaatttttgtattttttagtagagatgggggtttcaccatgttggccaggctggtctcaaacacttgacctcaggtgatcctcccgcctcggcctcccacagtgctgggattacaggcgtgagccactgcgcccggcctgtgtttactttacaagtcccacttattttattgatttttaactaaattcctctgaagaggaacctttctgacacaacatgaggaaacctggattttctgatacatgttaaaccacagagcggctcgggtggctcatgcatggaatcccagcactttgggaggtcgaagccggaggatcacttgagcccagaagttcaagaccagcctgggcaacatagcaagaccctgtctctacaaaaaatattaaaaattagctgggctttggggtgcatgcctatggtcccagctactggggaagctgaggtgtgaggacttttttttttttttttttttttttgagacggagtctcgctctgtcgcccaggctggagtgcagcggcacaatctcgggtcactgcaagctccgcctcccgggttcacgctattctcctgcctcagcctcccgagtagctgggactacaggcggccgccacaacgcccggctaattttttgtatttttagtatagacggggtttcaccctgttagccaggatggtctcgatctcctgacctcgtgatctgcccgccttggcctcccaaagtgctgggattacaggcgtgcaccaccgtgcccagctggtgtgaggatttcttgagcccaggacgtggaagctgcagtgagctatgatcacaccactgcactcccacctggacaacagagcaagaccctgtctcaaaaacaatgcaaaaagccacagaattcatatcatctaaaatcatccttgccttcaccttcctgaaatgctcccggccaagagcaatctcaggccaatagttctcacctgggggtgattctgctcccgccaaccagggaacactggacaatgtctggagacatttgtggtcctgacgccttgggaaggggtgagcggaggccagggatgctgctcgacccctgcagtgcccaggacagccccaccccagagaacagtccaaccccaaatatacacagtgtcccagggaagaaacttcttctaagggcagagaatgggctccaatcctaccctgggctgggcatggtggctcacacctgtcatcccagcactttgggaggctgaggcgggcagatcacttgcggtcaggagttcgagaccagtctggccaacatggtgaaaccccatctctactaaaaatacaaaaattagccgggcatgatggtgcacacctgtaatcccagccactcaggaggctgaggcaggagaattgcttgaacctgggaggcagaggttgcggtgagccgagatcacaccactgcactccagcctgggcgacagagccagaccctgtctcaaaaacaaacaaacaaaaaatcctgccccgctcccttgaggtacctatcgtgggcccaggaagggactgagagtccagggcaggcaccaaccatcacacagaggcccccatgttgtcgcgtggctgacacttctctgggccaagtcattcccggagcttgaggaacttggctgagggtagcctggctctactgaaagtcccctgcctgggggcctccctccttgacccttgcaggaccccaggtgacaggcagcccatggagtctgtggagggcagaggacctcgttggaagctggccttccgagctcccgtgcgagggcgggattctcgtgcccacagtggggtccttggtttgcagcttctgaagcctttccctgtgaggggttggggaggggtgtctcagggttcccggggcctgggacagacaggcaggaccccgctgtgcccctggctcagtggcttctccagctgggaaggcaatctttggggggtttttttgaggcagggtctcactctgtcacccaggctggagtgcagaggcaccctcatcgctcactgcagcctcaacctcttgagctcaagcaatcctcctgcttcagcctcccaagtagctgggactacagggcgtgccaccgtgcccagctaatttttttattttatgtagagatgggatctgtttcccaggccagtctcgaactcctgggctcaaggaagcctcccaactcagccttccaaagtgctgcgattataggcgtgaaccacctgggtcatcaggaagccagtctgcagccccctccctgcctgggaggcactggagggtgtgtgcgcagacagatggacagtcccttccatggagaacctgaactccctgccctgccctgcccgctcccctgggaccacccagccctgggactctgccctcaggcccttccccagaagtcctgctggccatgggaagagagaggctgagacccacccggatggaagcagagaggccctgggaggtgggggggatgaggttttagtgccggcctccccccaactctatttcaggcacccccaccccacccccaaccatctgccactcacatcaagtagtagtcagccggccccttaatcagcagttactccgctggcgccgccccccgccccccaccccagggccctaccagggccaaagctgtcacctccaaggccaccgagcttgggtgccccagactccctgctgccagggccttaagggggtgtccttggggccagctgtgggcccagctagggcctgggggagaagcaggctgaagaggccagacaggatccaccctgcacattctgggggagctgcgggctcccgagaaatggccttgtctcctctctgcccccgttaagcttctgcagcattcaacgaggtcgagaaaccactgagcttccgggaggacgagggcccagccccctccaaggtaggggagggggtgacaaggtgggggtccagcggctctccaagcagggaacccgtgaggtgcagtcaatccaaacagggctcattgaggacatggcctgtaagttctcccctaaagggaccttcaaactatgaaaccccagagaggggcgggagaccccaggacagccaggggttggggtggggagggggccggagggagggagcccccacctccgtcctcgccattcgcctccccccactgagggagccacagctgtggccacatcatcgcaagacacacatgcattgttggggtcacccggcctgcggcgggatccccggctctgtccccttagataaggagaagcagtgagcaggcccagcccccaaacagctcagccgctgcctcctcctcctcttcctcctcctccccacagccatcttccctgctccttaggcagggctgggcctgggctgtcctggaggccaccgaaccgcctgggacaagtaggtaccaccccggatctgtgcttcggacgtcctttgaggggggatctcatttcaccactgttctgtgtctgacttccggccgccgagcgggggcccgtgttctgcacgaggctgaccagggggacggggggagagatggttttggtacttacttttctttttgtctcacaacaggggggttaaggttctcgggggctgaaggagccgcttggggctggcaggcctggctttatagcggctgtcaccctggacctgggcaaaggcaccgtggttattaatagtgaccgcagtttcatgcccgtgtatggtcaaggccacggcagctgcgggctctgctggactcaggcctcctcccaacacctgctccaggccctgacctggaggcgccaggcagcgctcgccccacccaacgcgacttggcaatgactaagtctgagaccctagaatcaaacaagactcatagttgggggccctccagagggtgccaggccccgctgcagcccttccttccgccctcaccaccatcttgggaggcagatggaatcgctgtcccctggggagggggaaatggcagagaggcagcaccgtttaccaggagcagagccaggatgtgcttcaacccaggacacattttgcagacagtgtgtaactaaatccaagctgcggcgcaaagcctcaaatgcgtgttctgtgtcctgtgctgcctttgctcagcctggggaaaccgggagggccccgatggcctcctctgctcctgcaggtgcgtcccctaggcaaagagccctccatcctcagagggggctgggcagggtcctgcttctccttgagtcacttctgttccctgctagccctggaactcttctgctttcctcttctccccttctcctcttcttttctttttgagagagtctcactctgttgcccaggctggagtgcagcagcacaaccgtggctcactgcaacctccgcctcccgggttcagaatgattctcctacctcagcctcctgagtagctgggacttcaggtgcccaccaccacgcctggctaattttttgtatttttagtagagacgggatttcaccctgttagccaggtcggtctcaatctcctgaccttgtgatccacccgcctcggcctcccaatgttcttggattgcaggcgtgagccaccgcacccggcctctttttttttagacggagtctcgctctgtcgcccaggctagagtgcagtggtgcaacctcggctcactacaacctccgcctcctgggttcaagtgattctcctgcctcagcctctggagtagctgggattataggcgcccgccaccacacctggctaattttttgtatttttattagagacaagaatttcaccatgtggttcaggctggtctcgaacttctgacctcaggtgatccacccgcctcggcctcccaaagtgccggttctgttcttttttttttttttttttttgagacagagttttgctcttgttgcccaggctatagcgcagtggtgcgatcgcagcttaccacaacctccacttcccgggttcaagcaattctcctgcctcagcctcccgaatagctggggttacaggcatgcaccaccacgcccagctaaattttttatttttactagagacaaggtttctccatgttggtcaggctggtctcaaactcccgacctcaggtgatctgcccacctcggcctcccaaagtgttgggattataggcgtgaggcactgtggccggcctgcttttttcttttcttttcttccacccctcccttgccctctcctcccctctcttccccttgccttctctcttctttttctcttctcttctctttttttcttttttcttttcttttcttttctgacagggtctcactctgtcacccaggctgcagtgcagtgatataatcacagctcactgcagccttgaccgcctgggctcaagtgatcctcccgcctcagcttcctgagtagctgggattgcaggcatgagccaccacacccagctaatgttctaattttttgtagacacagggtctccccaggttgcccagtctggcctgcaactctcgggcccaagcaatcctcccgcctcagcctcccacagtgctgagatgacaggcgtgagccaccgcacccggcctgaaattttctcaacaggccgatcatctcttctctggggaagcggaggccccctcaccctctcattactgcaaagcctgcctcccacggtccctggctgtgtgctgtgttcctgagcgcagcccagagttgggggggaccctgcgtggtgtggggtgttccctcccccgcgacgtctatcttatctgtccagcacctgaggtcctgtgttcaaccagccccatgacctttctctgatgccccagggttgagtcacagccaagctatggcctgaacccagcttgccttgtcctggaggtcacgcctggcccagcagctgcaggggggcggggggggggacccgcacgcgacaaccctgcccaagagcagcagcacggacgcccaggacgcaggcagctgcagtcatcgctggatgcacagggatgggcaccaggcaagaaacacaccaagccctcactggctctccctggcgctgagccctgtcccagggatgtctttgaaaacttgctcccactggctggacgcagtggctcacgcctgtaatcccagcactttaggaggctgaggcgggcagatcacctgaggtcaggagttcgagaccagcctggccaacatggtgaaaccccgtctctactaaaaatacaaaaattagccgggcgtcatggcgggcgcctgtaatcccagcgctactcaggaggctgaggcaggagactagttctgtctcaaaaaaaaaaaaagaaaactcgctcccaccagacagaccctgagccccccccactcctctctgcctcactccatcccagccactccttggctactggcatgaccaagaggttgtctgcccatacatggagcctcccggcagggcctccagctgccgcccctcctgaaagccgaattcgacaggccagattctgcaggggcggtgagaccacggctcgccccagggcgggccatgggtgttttcttgacctagaaatcagaccagtgaccgtcccagcctgtgggagctgagggctggaaactgccagggacctgccagtgccaggtatagtcacagggcaggtcatgatatgcccgtgtgagccagacaccacgctactcaagaggctctcagagctccagaggtcaggaggccagaaggaaggtgccagcagagccaggctccctcctacccctccagattccggtggtggccagtggtccttggctccttggccgcaccgctccaatctctgcctccatctttttttttttttttttttttgagacagaggctcgctttgtcacccaggctggagtgcagtggcacgatctcaactcactgcaacctccaacctcccgggttcaagtgattctcctgcctcagcctcccaagtagcctgccatcacacccggctaatttttgtatttttagtagggacgaggtttcgccatattggccaggctggtctcgaactcctgaccttgtgatccacccagcttggcctcccaaaatgctgggattacaggtgtgagccaccatgcccggcctctacctccatcttcacatggcctttctcggtgggtaggggggacagggattcactttgttgtccaggctggagggcagtggcacgatcatagctcacagcagcctcaacctcccaggctcaagcgatcctcccacctcagcttcccaaataactgggactacagacgtgtgccaccacgcccagctaatttttgtattttttgtagaaacgggggtctcactattacccaggctggtcttgaactcccgggctcaagcgatctttctgtctcagtctcccaaagtgctgggattacagctgtgagtcaacataccgcgcccagcccccacgtagtcttttctttcttttttgagacagagtctcactgtcgcccaggctggagtgcagtggcatgatctcggatcactgcaacctccccctcccaggttcaagcaattctcctgcctcggcctcccgagtagctgggattacaagcacctgccaccacgcccagctaatttttgtatttttagtagtgacggggtttcactatattggcgaggctggtctcgaactcctgacctcaggtgatccgcctacttcggcctcccaaagtgctgcgattatagccgtgagccaccgtacatacccagcccccatgcagtcataaggactagggcccaccctacttcagcatgatgtcattctaactacctccacatccgcatcctaacaaattacatctaccctatttccaaataagggcctatttaggaattcagtatttttgtggaggacaccaattgagctctcaccggacaccctgagtgggggacagggtgccccatctgaccctctgccagtggaactcagcctcacactgctgtggagtgggaatcccgtagaattgtgagcccctgaagctgctgcacgccactgccacccaacgtggattctggggtgtccttgacaagactgagcactccacgggtaccagccccatctcaggtgcccagaggaaggccagagacggggctggggactcggggctcggggtcaccccactgaggaaggctgggccagagtgtggttgcatgctcccagcaatgggagcccccgggggtcctggtctcctggtgtagctggtccgcccctccccagcagggttcatgttctgctggttccaggaaaagggctgggagtatgagtttgggccctgctgtgcttccgtggacctcaatttccttgactgaccagaggggctgacctgagaggcctcctggtcttctgggggctgagggggtgatggtcctggcctccggtggggtcccagaggcctccgagaggccaaggcttgatgctttgtgtactaggggatgagaagccctagggggtctggtagggagtgctgaaggctgtgacgattaaccagattggatgtactagatgtattattattattattaattattgttatttgtagagataaggtctcaccatgtttgccaggctggtctcgaactcctgggctcaagtgatcctctgcctccacctcccaaagcactgggattacaggcatgagccaccatgcccagcttgaaatatgtttttattatggttaaagtacacatagcaggccaggtgcggtggctcacgcctgtaatcccaacactttcggtggccgagacgggtggatcacctgaggtcaggagttcgagaccagcctggccaacgtggcgaaaccccgtctctactaaaaatacaaaaaattagctgggtgtggtggcaggtgcctgtaattccagctactcgggaggctgagggaggagaatcgcttgaacctgggaggcagaggttgtagtgagtttagatcgcgccactacactccagcctgggtgacagaggcagactccatctcaaaaaataaataaataaaatacacataacatacaatgcaccactttcaccctttttcctttttttttttttttttttgagacggagtctcgctctgtcgcccaggctggagtacagtggtgcgatctcggctcactgcaagttccacctcccaggttcacgccattctcctgcctcagcctcccgagtagctgggactacaggtgccaccacacccagctaattttttttttcgtatttttagtagggatggggtttcaccgtgttagccaggatggtctcgatctcctgacctcgtgatccgcccacctcagcctcccaaagtgctgagattacaggcgtgagccaccgtgcccggtgtaccgtgcatttatgagacaaggtgttgctctgtcaccaaggctggagtgcagtggcgggatcacagctcactgcagcctccacctccagagctcaagtgatcctcccgtctcagcctcctgagtagctgggaccacaggcaaccccactacacctggctcacatacaatttttgtgtggatgtaccttttcctgcctctgtgaatgtataaaaccactgaattgcacactttaaaagaaagattttagggtgtgtgaatcatagctcaatgaaagaaaaaaaaaagttaaaaaaaaaaatggccagatgcggtgactcacgcctgtaatcccagcactttgggagcacaagaagggcagatcaattgaggtcagaagttcgagaccagcctagccaacatggtgaaaccccatctctgttaaaaatacaaaaattacggccaggcatggtggctcacgcctgtaatcccagcactttgggaggctgaggcgggcggatcacctgaggtcgggagttcatgactagcctgaccaacatggtgaaaccctgcctctactaaaaatacaaaattagcccggtgtggtggtacatgcctgtaaacccagctactcgcgaggttggggcagaagaatcgcttgaacatgggagacggaggttgcggtgagccaagaccacaccactgcactccagcctgggcaacaagagcaaaactccacctcaaaaaaaaaaaaaaaaaaattagccacgtgtggtggtgtatgcctgtaatcccagacacctgggaggctgagacaggagacccgcttgagtccaggagaccgaggttacagtgagccaagatcgcaccactgcactccagcctgggcaacagggccagactcgctctcaaaaaaaaaaaaaaaaaaaaaagcaaaaaaacttcctccagggaggatggacagggtcggggcccctctctgaaaccacctgtgagccctagcagctgagctgagccgctccccctccagggccacctgcatgtggctccagacggggcaggggctcccacgtgggacacagcagcatcccgtaaggcgcaaagggacaggaaacgcttctgatccacctcagctgcccagagcttccacctcattgcaatcaaaacactcggggcagctgagaccaagatccggcagctcccaggacaccgtgaaggtctgcgaggacccccggtttgtcccctccttcctgagcacagcggcaggcatggaacacagagagaaacatgaacgccgcggagggcatatccccagtggccaagggctggctgtcccctgccaaggcctgaggcacacaacacccgcgtatctggaagccagtattttatttctcttggctgcagagggccgctcttgcctaggcgtccacaggcgcgacgatggggctcgcggaggagtccgcagcagggcaccccacacccgggggaccggcctcggcgagaagggcacacagtggaagaccccaccaagcccggcgccacccagcagcgtggggactgcctgtccgccgtccatcccaccctccccgtcccacgacctcctcctgggctaatggcagcaacaggcagcaccccgccgaattgtccgtgcaactacccgcaaaccctcctccgggcctgaaccagggctgcattcgggccgcctctgcgcctcggtgggtcccaaccctcacggtgccacaggccacgctgcctggagggtcccagggtcaccgacgatgcaggggtgaaggtgaaggccagcgtggaggctgtgtagagaagcagccccgtcccacacccacccctgcctgcgaacttacgggcctggctccagctcctcccactccgcctccagcctggtggcgctgggcaaggacaggcacccgggcgatgggaggcgcagcgtccacaggaagcgcccccaccgcaggccgagctccggctgtcctggggcctggcccaccccactgcgcctagcgcagcccgcactccacgccctgcagcttctcctgctccagggcgcgcacgaggtcctgcacgaagcgcatctcggaggctacttgcttggccagcgcctcgtagcggttctccaggcggctgaagcggcgcttgaggccgctggtccccagcagcgcgcccttggcctcctcctgcgcctgccgcttgagcgcctcggtcttgagcagctcctgccgtagcctccgcaggtcctggcccaggctgtcgctctcctcgcggtaccaggcctccttctcctcgtagatggcggccagcgcctccacgtcctcgtggcagagccgccggctgcgctgcagctcgcgcaggccctcctcggcggccgccgcctcctccagcaccttggagaagcgctcgaagtcggcgtagctgttgttgggcggcaagctggagtgcgacttgatggtgtactccttcagacgcgtggtcttcaggcgccgccgctcgggcttgcggccgctgtcctcaccacgcacgttccgccgccggatcgcctaggaaggagggaagcctgagcggggtccccgcgatgccacccagccccgccagcccccacctgccagtgtgaactgaggttcaggggctcatccggcagcagagtcaacgcctcgtgacggagactgcccagcccgacgcaaagccgagagtgctctctcgagaaaaacgctgcggccctggccccaggagtcagccccgttggacacacaccagccaaggatgccaccaggtctgtcgggtgctggacatcccacgcccaggacccaacccccgccacacaggctcactcctctggggaccctccccagccactgggggttgtcacatccacaagccttaaatgctgaaggccccccgggaccccagcgagaaggccaaggcgggaagcccagggagctcccccacctccccacttaccttaatccaggaatgttccaggctctgggcaatggtcattctccgcctggaagacccccgctctggttaggtacacctgcaccatctgtcccgtcctcccgtgaacaactgactcccgggacccccaaaagccctaaagtcgccccccagcctctgctcagccaaccacagaagctgaacaagggtactgcagggagcgtggggttttctggggggtggtggagagagctgagacctcaggctggagtcgcaaacccaggcgcccgagagagggactgggcggccatggaggcccggggaggcctacgagtgagggctcagcactgccagaattctaagtgtttacaggaaaacaagtgacctggaattttacatggatccttactttacacaccggcaactaattaaaagtttgctaaaaacacagcaagcagccagacacggtgtctcacgcccgcaatcccagcactttgggagaccaaggcaggcaaatcacaaaccaaggaggtcaggagttcaagacaagcctgggcaacatggtgaagccctgtctctactaaaaatacaaaaattagccaggcgtggtggcgggcgtctataatcccagctacttgggaggctaacgcaggagaatagcctgaacccgggaggcagaggctgcagtgagccgagatcacgccactgcactgcactccagcctgggagacagagcaagactccgtctcaaaaaaaaagactccgtctcaaaaaaaaaaaaaaaaaaaaaccatggcaatggccagcttgggccaccagtttatcagtttactctctccagcccaaggggtaagcaatgtctgatccccagccgcagggaggtggcgctgggaggagagtcctctggagcctccgtgggtggagtgggcctgtgtcccatgtcccaccccgtgccccctgccggcccctcgtacttgggatctttgacgagcagccggcgaatgaagtccttggccagctcgctggtgttgctgaagtactcctcgtcgaagtcgtagttcacggctgagatgttggtgagcgtctcctgcttggtctcgcccaggaacggggatgcaccgctcaggctgcgagacaggcgtgggggctcagtggggtcctgggctcccaccacggccgcgccgcctctccggctgcccacgacaggcggagcacagaagacaggctgacggcaggtgcctgggccactcacactcctgagcccttagaaccttcctgcaacgatcccagacaccacccaagaggcattcaaaatccacccccccaccccgccactgacagcagcagaaatgaacaggcagaagtctccttggagactcgaagtatctgtgcagacgcagagcccgaaagcccccagtgctcagtaacgccgaggggagggtaactgcagtggggagcccgagccaacaccttagccaaaggatcaaggtcaacagcccggcagtgagaggccccaacagcgtctgcctcccagcctgacgctgggagggtgacacagcatcatccctggggttttgagcagagacactgaagccccgtctgatcgtctgatcgtgacagcgcacgagactaaacgtggactcagacgccttctgcaaaacacctgacccgtgagcacaagtcagggtcaaggtcatgaaagccagacagaggaacagcctcagactggaggcggcgaaggagctgaatggctaaatgccgtgtggggacctcagagaggacaggagtggaaaacgggggtgtctaaccacctctggcactttaaattttttaaattttttagagacggagtctcgctctgtcacccaggctggagtgcagtagcgcgatctcggctcactgcaaactccatctcctgggttcatgccattctcctgcctcagcctcctgagtagctgggactacaggcacccgctgccacacccagctaatttttgtatttttagtagagacatggtttcatcgtgttagccaggatggtctcaatgccctgacctcgtgatctgccctcctcagcctcccaaagtgctgagattacaggcgtgagccatcgcacccggcccatctagcacttttgtgattagcgtagcaccaaggctaacgtcttggtgttcataacgttcgtgttcatgaaaaatgtaaactgaaggaggaggaagctgcagggggcgtctgtgctgtttctgttgctcctttgtaagtctgaattatctgaacatttaaaaagaatacaaacggtctagcccatctcctgaagcctttgggtccgctcacgcactacagcgggctgggcccacgccattgtttatttccttgcttactgaatgagctatgcccattcaatatggctgggcaacacagtgaaactccacctctacaaaaacttttaaaaattagccagctgggcacggtggctcacacctgtcatcccagcattctgggaggccaaggcggccggatcacttgaggtctggagttcaagaccagcctgaccgaaatggtgaaacatcgtctctactaaaaatacaaataattagccaggcatggtggcaggcacctgtaatcccagctacttgggaggctgaggcatgggaatcacttgaacccgggaggcagaggttgcagtaagcctgagctgagacggggccttggcacttcatccagcctgggcaacaagagcgaaactctgtctcaaaaaaaaaaaaaaaaaaaaaaaaattagccagctgggtgcagcggcccacgcctgtaatcccagcactttgggaagccgaggcaggcagatcacctgaggtcaggagttcaaaaccagccttgatcaacatggtgaaaccccgtctcttctaaaaatacaaaaattagctgggcatggtggtgggcgcctgtaatcccagctactcaggagactgaggcaggagaatcgcttgaacctgggaggtgggggttgcagtgagcagctgagatcgcaccactgcactccaacctggacaacaagagcaaaactccatcaaaaaaaaaaaaaagtccgagcatgggagcatggttgtgtgcacatgtagtcccaggtactcaggaggctgaggtgggaggattgcttaagtctgggaggtggaggctgcagtgagctaggacagcactccagcctgggcaagagagtaagaccccgtctcaacaaataaaaataataaacaacagcaggcccacgtgtggcccagggacaggagccaaaacccagcgtggggtcggaccccttccttgcacttcgagaggaggctgggctccctagcagccagagggacaggagcacacacgacccccaacccggagcctgctcagccgctctgtgagtgtcctgccttcagaactctccagaagcctctgtgacagcagccacagagaatcactcatccgttcacccggtatcccctgagtacccgcgatgggtcacagccaggctggggacccctggcgtccacatgagacacacggagccggggacccatgccagctgtgttgcacagccgagggggcccccgccaggtactcacaggatataggtgatgacaccgatgctcctggggacagacaagaggcaagggtcagcgcagcgtggggccgcccaccctcccaggaccgtggcgtccagcgcccctgttctagggcaacggtccccccataccccaacagcagcaaggccccgcttcatccccagctgcagcactggcctgcgctccaggaatgcagggaggcccggtgggagcaggtggtacactcaccacatgtccgcctccaggcccagcggctcatagttcacaatctctggggctgcagaacagggagatgtgggtcaggcactggggacatgctggccaaggaagaggctcaagacacaggcatggggtcaaggttctcacatgtcgcagcccttgggggcatgaatgcggcagagctggccctcagggcctgacgggtaggacagcggggctgcaccaaatggaggcccagacctcccgcaaagccgggcccaagaggggtggcttcagggccgaggacgcggcacccagcaccgggcatgacccaccccacgcacagcaggcagccccagaccaccctccccaggccggggctgcccactgggcagggcctcacccacaaactccggggtgccgaagatgttcttgaactcgttccccgcctcgatcttgtgcgcgatgccgaagtcgatgagcttgattcgtgggttgggcacgttcttgtccagcagcatgatgttttccggctggggtgggaggaggctcagcagggaaagcacgggcctcccccaccctcacccccacgctccccaaacctcaccctcacgctccccgcaacctcacccccacgctcccccaacctcacccccacgctccccaaacctcacccccacgctccccacacctcacccccacgcgcaggaggtgccttccaggctcttccccgccccatccccacccccacactggccaggccggccccacagggccctacagggctcaccttcaggtcaaagtgtgcgatgcgcttagagtgcaggtagtgaacgccgtccaggatctgcttgaggaactgggtggcctcgtcctccgtcagcgactccttctccgccaggaagtcaaagagctccccgccagagaccagctccaggatgaggaccacgtccgtcttgttctcgaagatgtcgtgcagggtgatgatgttggggtgccggatctcccgcaggatgttcacctcccgctcgatctcctcccggctcaccccacgccggctggatgacaggcggcgcttcttgatgaacttggctgcgtactccttgcccgtgcccttctgccggcacttccgcacgatcgcaaactggccgctggaggagggggagggagtgagtgggggtggaggaggcggagggagtaagtgggggtggctggctccccgtcacctccacttgctcctcttgggcgcggccctgcaccaggcacttgaaggacatgagctggccactgcgggggtgcagactctgcgccttctcagagagcaattccttagcgccccacaccatcagacgcggcgttcccacccctcccagggctatgcccagcaggtgtgtggaggggagtgcagagccacacgttaacaccatggcaccggcgtatttttgaaaagtgaaagaatgaacagttcaatgcatatcaagagggaactgagggggccaggcgcggtggctcacgcctgtaatcccagcactttgggagttcgaggagggcagataacttgagctgaggagttcaagagcagcctggccaacatggtgaaaccctgtctctaccaaaaatacaaaaaattagctgggtgtggtggcgggtgcctgtaatcccagctacttgggaggctgaggcaggagaatcgcttgaacctgggaggcagaggttgcagtgaactgagattgtgccactgtactccagcctgggcaacgtagcaagatcctgcctcaaaaaaataaaaagtgcaaggcaagtgccagatccgctttttttgtttttgttttgttttgtcttgagacagggtctggccctgttgctcaggctggaatgcagtggttcagtcatggctcactgcagccttgacctcctgggctcgggcaatcctcctgcctcagcctctcaagcagctgggactacaggcacataccaccacacccaattaatttttttttctttttgtaaggatgaggtctcactatgttgcccacgctggtctcgaactcctgggctcaagtgatccctcccaagtaggtgggactacaggaacacactaccacacctgatttatttattttttgtagagacagggtcttgccgtattgcccaggctgctttggaactcctggcctcaagagatcctcccactcccccaccccaagtgttggcagtacaggtggagccgctacatctggccagtatccgcattttaaagaaaccaaggctgagaaaaggaaagcaactagcccaaggtcatgcagtcagtcagtggcgggaggattcaaaccttcaaaccaggtgctgcaggctccagagcccaggtgctctaacaggaagcagacagctgctgctgggtaccgggttcctgcgtgcctacctcccggctccacgctgtctcctgctaacagacccagctgtcccagggcagcctttgccgctcactctcagtctgtgggactcagtggcccaggaaaggggtggaaggggacacgactggacctgggcaagcagaaaaccacgccttccagcccaaagagaccggtccagtccacagggctctgaacgcctgctgggaagagaggatctctctctccctctgctgggcttggatccaggctcgcggcaggggccaccacgtagaaggctacctaagaagcctgcctaagaacagaccaggccaggagaggggagccaccaggcactgcgggtggcacataagccccgtcattcactctgccagggcgcctcctccatgctggagtggacttcggccccggggacacagggcaccatatgcaccagcacccagtcacacctgcggccgctgcacacctggacaacctggttctgtaaaccacgcctttccctgttttgctattgccaaccagatttcaggttctgccactgagtcctcctacagcaacagcagaccacagccgcccacctccagacagcccccggtctcactggccacagacttgctccttagaggcaaggccactggcaggctctcagttcctctacggaatgtgaaacgtgcctcatctccccagccgggaaagaaactccccaagagctgagcccaccctcttcgcttctctgtaacttccccagcccccagcgcaggtgggggcacagcaagccctcctcagtgatggtctcaggtgtcactcccaacccacttcctaagtgcctgccacaacccagacacgacccaagcgtggcctacacaccgacaatttctactgatagagttcatgatgtttaaaaatgcgggctgggaagccgggcacagtggctcacgcctgtaatcccagcactttgggaggcaaaagcgtgcagatcacgatgtcaggagttcaagactagcctgaccaacatagtgaaagccacgtctctactaaaaatacaaaaacattagccgggcgtgctggcaggcatctataatcccagctactcgggaggctgaggcaaggagaatcgcttgaacctgggagacggaggttgcagtgagctgagattgcggcattgcactccagcccgggcgacactgcaagactccgtctcaaaaaaaaagtgtgggctggggccaggcacagtggctcacacctgtaatcccagcactttgggaggcagaggcgggcagatcatttgaggtcaggagttcaagaccagcctggccaacatggcaaaaccccgtctctactaaaaatacaaaaattagctgagcacgttggtgggcgcctgtaattccagctacttggaaggctgaagcaggagaatcacttgaacccgggaggcgaagattgcagtgagccaagatggcaccactgcactccagtctcggcaacagagccagacaccgtctcaaacaaacaaacaaaaattgctacattctgggccttcatcttgcacttcatgtatctctgagaatgttccagaccactacctgaagcagtgccgtcagaacagcagacactggccacccagagctgtcaaacccgtgaggtgtggccagtcccgagaaaaactgcgacatgaaatacacaccagacctccaaggcttcacggcaaaaacagaaggctaaatactttttttaaaattatgaatttctgtttgtttgagagatgggggtcaacttatgttgcccaggctagtcttgaagtcctgggctcaagcgatcctcccgccttggcctcccaaagcgctagaattacaggcggaagccgccgcacctggccctgcctggttctttttacaagctgcatcctattccagccctgatgcagtggtttggggaaggccatttaagaggctgctgttcccagcggggtgcggtggctcacgcctgtgatcccagcactttgggaggccgaggcaggtgaatcacctgaggtcagtagttcgagaccagcctggccaacatggtgaaatcctgtctctactaaaaatacaaaaattagccaggggtggtggcgggctcctgtaatcccagctactcgggaggctaggctggaggccgaggctgcaatgagtcgagatcgcatcactgcactccagcctgggcgacagaatgagatagtgtcaaggaaaaaaaaaaaaggctgttattctggtaaacgttctagcaactaccccagtcttaagtcattccatccatgtatgtacagttttccaatgaattaattcctagaggtgaaatcggcgagttaaaagaaatttggctgaattttgctgacttttgccaaacgacccctagcaggaggggtcaacactgaagcatgagaagggggaggagggagcatgctttctctgccactaacgaggaaattcctgaaggagggacctcaggatcccaaaagagcctgcagcactctccctagcctgacacagagctcacttatttacattcccttctggtgacatcatggggaggctccagggaggctggccagtagcaaactcaccaaataaggctggaggctctacaaaaggaggcagggcctagtggtgcctggctagtctggagggggtggggccccagggggaccctccaaggcccagacaggcaggaaatcagctgcctccctggaagaggaaacctctgctttttcccacaagcatgttaaacaattgaccgaggtttgggcccagctgggagacacgcccctccctccccccactttaaacatccaagagctgggcaaaaaaactaaagtgcctcccacaaaagaggattaacacagggagatttttttttttttaaataaatggggtttcactctgttgcccaggctacagtgcagtggcacgatcatagctcactgcagcctcctccaactcctgggctcaagccatcctcccgtctcagcttccctagtagctgggactacaggcatgagctaccacacctggttaattttttttcatttttattttttgtagggatggagtcttgctatgttgcccaggcagaagacacatcttttaataacaaaagcagctggcatctgttgctctggtgccccatgccaggcacggtcttggctgctgtaacggctcaattacttttctccccacaggaaacacacagaggattcccaagcaggaattcacagccggggctgtctgactccacggcccaaattcgttcccccaccgcatgatactgactcattccttctcagcatacaggataaagaacaggaaaggagagctgctgttcagaaaaccccacagcgcctctctcctatccctggagcccagccgtgcgggcagacagctcacctgcccagctcctcccccatctcataatggtcctccacgtcctcctgcctgaacgtggacatggcggccggtccgccttccagcagcttccactccagggaaagtgcagtcaccgcagcctggagataggacctcaggagtcccctaatggcaaccctggagaagacagggaaagacagaagtgaggaactgagacaccacccttttctcctagattaatggacagacctgtccagcaaacacaagcctcccacctctccactctgaagctccaaactcgacaaaaagaggtgctgtgtttactgggctgggtcctgtcatgtcacctcttagagccccataaccactcaaaagtttggtaacagccccactgggccaccttcaccccgcaaaactctctccagacacataattctgatttccccgacgctgcctgcgtctttttttgcctctcactcctagacttctctcaacctgctcagccaaaatcccccaccattcctgcacgttctcctcaacctcaaatcccagggctaccttactccctggccaatgtcttaacgaagttctcaagtctacttcttttgttgttggtgttgttgttttttgagaaggagtctcgctctgtcgccctggctggagtgcagtggtgcaatcatggctcactgcagcctggaactccaaggctcaagcgatcgtcccaggcctcccaaagtgctgccattccgatcaaaattcccaagttactaccttaacccctcctggtccttgccctcggcaggtctcttaagaccctcatcgatggaacacccccgcccacccccaaccatctctgactccctccaattctgaattttccaagaaccggacgacgccttccacgctcctgaaagcccactttgcctccctcccccgctgacctccactgtcctcgcaagattaacctcttcctccacgctccatgtatcaaagtcccccaaccgccgtctcccctaccccccaaaacgggccgccaaaaagggccccatctgagtctcctccaccgtcctctgccccttctcgcccgcaatctccgcacaagcccctaggcagaccccagtggctccctttgcagaacctccccccgcccccaaggccttgcccatccctaaggctccgctccagcatccctggggccgctacgcccctcgcacgcccggccgagccctttccccggcccggtcacccagatgggtccccaaacctaccagctcctcagattctctccctccctcgtcctccgcgggcccccgaagcgccgctctggccccacccagccctccagcctcggcccgagcccgctctttaccctccgcagcccggagaatacggccggcgccgccgcgctggccaccgccgccgcctccagaagccccgcgcccctgccgccgcgacgcgcctgcgccgacgtcaccgcacccgccagtgcccacccccgggaaacgaaccccgccgcctattggccggtgcgcccgccgctcgtgccgcacctcgacgtcccgcccccagctgccttttcggcacccacacccggatgcagcctcaccactggctgaacactcgccatccctgatttcattggctgcagtcgacgctggtcaagcggacggaaaaaaggccgacttccggtcccttcatcgccccgcccgcctctcctctgacccaggtgctgaagctgcgagaagtgaggctgaagccctgcatcccgcttcctgccttcctggagcaccggttgggcgaatggatggctcacctgtggccgagcgcgcctggcagctcctggagtggaccctgggactgctttagtccctatgtggcagtttcctccactgaaaactgttacccacattctaaatacttaaaatgcaaatgaggtcaatctggggttgtcatacacagggtccctcttcgtctcaaaatagagggtaacagcaagcattttattgagacatagtatgtgccaactgacaacactgggaggtatcaggtttgttttttttttaattttattttttgagacagggtctcactctgtcacccaggcaggagtgcagcggcggtatccagctcactgcaacctccacctcccgggttcaaacgattctcgtgcctcagcctcccaagtagctgggattacaggtgcccatcaccacgcccggctaatttttgtatttttagtagagacggggtttcaccatgttgcccaggctggtctcgaactcctaagctcaggtgatccggcacctcagctttccaaagtgctgagattacaggcgtgagccattgcgcccggcctaaattcattttttattattattttgagacggagtctcgctctgtcacccaggctggagtacactggcacaatctcggctcactgcaagctccacctcccaggttcacgccattctcctgcctcagcctcccgaatagctgggactacaggcgcccgtcaccacgcccagctaattttttgtatttattagtagagacagggtttcaccgtgttagccaggatggtctcgatctcctgacctcctgatccgcccgcctcggcctcccaaagtgcaggaattacaggcatgagccaccttgcccagcctttttttttttttttttttttttttgagacagtctccttctatcgtccaggctggaacgcagtggtgagatctgggctcactgcaatctctgcctcctgggttcaagcgattctcctgcctcagcctcccgagtagctgggactacaggtgcacgccaccactcccagctgatttttgtatttttagtagacgcagggtttcaccatgttggccaggatggtctcaatatctgtgatccgccggcctcggcctctcaaagtgctgcgattacagacgtgagccacaagccggcctttatattttttatttacattttcaacgtacaatgggttggccaggtgtggtggctcacgcccgtaatcccaacagcttgggcagccaaggcgggcaggtcacttgaagtaggagttcaagaccagcctgctcaacatggtgaaaccctgtctctactaaaaatacaaaagttagccaggcctggtggcacatgcctgtaatcccagctactcgggaggctagcgcaggagaattgcttgaacccaggaggtggaggttgcagcgagccgagatcatgccactatactacagcctgggtgacggagggagactccatctcaaagaaaaaaaagtggcagggcatggtggctaacgcctgtaattccagcattttgggaggccacggtgggcagatcacgaagtcaggacatcaagaccatcctggctaacacggtgaaaccctgtctctactaataaatacaaaaaattagccgggcatggtggcgggtgcctgtagtcccggctactcgggaggctgaggcaggagaatggcgtgaacccgggaggcggagcttgcagtgagccaagattgagccactgcactccagcctgggtgacagagcaaagactgtctcaaaaaaaaaaaaaaattcagcttccacataccatcttaacgtttgcactactaaaaaagaataggacccggtatggtggctcacacctgtaaccccagcactttgggaggctgaggcgggctgatctcttacggtcgagcttgagaccagcctggccaacatggtgaaaccccatctcacctaaatatacaaaaattacacagacctggtgataggcgcctgtaattccagctactcgggaggctgaagcacaagaattgcttgagcacttgaatccggaggcagaggctatagtgagccaagatcacaacactgcactccatcctgggcgatagagtgagattctcgaaacacagtaatccgttaccctgactgctggaaacagcgtcagttacagccccaattcaaatgcgacagccaaaccaaacctcaggcatacctacatgtgggcaaaacctcagctgaggcttggccttgacaatgcagggccagagctgcccccgcctttgccgagaaccccacagccctacttcacagtccccacctgccttcctgaggacagagtaaaaggcggaaaatgatcatgttaaccttatcagcactgacaagattaggcctcctcacatcttaggcactatttagaaaaacaaatagttttctaagctattggcgctcacacctgaaatcccagcactttgggaggctgaggcagaaggatcgcttgagcccgggaaggagaccagcctgagcaacatagtgagaccccattactacaaaaaaagtaaaaattaggtcagcacagtggctcacgcctataattcccagcactttgggaggccgaggcgggtggatcacgaggtcaggagatcgagactatcctggctaacacggtgaaaccctgtctctactaataaatacaaaaaattagccgggcatggtggcgggcgcctgtagtcccggctactcgggaggctgaggcaggagaatggcgtgaacccgggaggcggagcttgcagtgagccaagattgagccactgcactccagcctgggtgacagagcaaagactgtctcaaaaaaaaaaaaaaattcagcttccacataccatcttaacgtttgcactactaaaaaagaataggacccggtatggtggctcacacctgtaaccccagcactttgggaggctgaggcgggctgatctcttacggtcgagcttgagaccagcctggccaacatggtgaaaccccatctcacctaaatatacaaaaattacacagacctggtgataggcgcctgtaattccagctactcgggaggctgaagcacaagaattgcttgagcacttgaatccggaggcagaggctatagtgagccaagatcacaacactgcactccatcctgggcgatagagtgagattctcgaaacacagtaatccgttaccctgactgctggaaacagcgtcagttacagccccaattcaaatgcgacagccaaaccaaacctcaggcatacctacatgtgggcaaaacctcagctgaggcttggccttgacaatgcagggccagagctgcccccgcctttgccgagaaccccacagccctacttcacagtccccacctgccttcctgaggacagagtaaaaggcggaaaatgatcatgttaaccttatcagcactgacaagattaggcctcctcacatcttaggcactatttagaaaaacaaatagttttctaagctattggcgctcacacctgaaatcccagcactttgggaggctgaggcagaaggatcgcttgagcccgggaaggagaccagcctgagcaacatagtgagaccccattactacaaaaaaagtaaaaattaggtcagcacagtggctcacgcctataattcccagcactttgggaggccgaggcgggcagatcacttgaggtcaggagttcgagaccaaccaggccaagcaaaattctgtctcaaaataaataaaaattagctgggcatggtggcacatgcctggagtcccagctacctggcaggctgaggcaggagagtccaggaggtggaggatgcagtgagctgactgcaccactatactcatctgggagacagcaagactctgcctctaaaaaagtgtttacaaggccgggcacagtggtacaatcccaacgctttgggaggccaaggcgggtggatcacaaggtcgagtgatcaagatcatccaggccaacatggtgaaacctcatctctactaaaaatataaaaattggctgggcgtggtagcacacgcatgtaatcccagctacccaggagcccgaggcagaattgcttgaacccgggaggtggaggttgcagtgagcagagatggtgccattccactccagcctagcaaacggtgagactccatctcaaaaaaaaaaaaaaaaaaaatgggtttctaataaactagtcaggactggggtgaccacagaaaatcctgatggcagatagaacttgtgagctcgtcagcaattcggaaagttgctgaaacctgcgaagttcaatccagagcccctcgctccacagggccatccaaatgcgttcaaagtgacatctcgtaattccttgccgcactgatcctacttcaaatgctcagcagacccgcgcagctggcagctgcttctctgaatgacacaggggtagggcattcccaccattccagaacgttccacctaacactgaggcagccccaggctgcacctaactagggcccgggtccccttctaggctccagggagcccagtactgggcagccccgctcccctgcgaagacaccgtgaaaaatgcagaacagagtcaccaccttatcaaatttattattccaatggcactagtacagctggaggtgctcatggtgacaccgcacaggacttcctgcctgctagaaatcatctacccgcgtgttcctttcccctttctggggcaaaagccactgcgggccatgtacccaaataaacctcttaatgcgtttgttaaaattagtttggacatctgagtttccctctgaagaaatggaaaaagtgttgggtgtcccatcccgcctccccctccccgaccggcccattaagtccctactaagagggcgtgtctgctgcctccggactctggaaataaatattgaaagaaacggcatcaagtgttatggttgagtgatggcacgcagcgggccccagaaacctctcaggggagcgtcgctgtgtcgggacagtctccaggtgtcgtctgagaattcgaggacgtggtgctgtgggtgctgcgagtccccggggcggcaggcgctgcaggaagggccgcctacaatttgtccaggaagttgtccagggcagggatgccttctttcaggcccttgcgcttgcgggtctccgccaccacctggctggggcggctgctgttgtcgaaggggtctccgggcaggatctgccagtggtcaaacacacactgggggaacgcctggccgcccgtgttggacctcaggtcagcggtgaagcctgcagagggaagcgagaggctcactgggccatcgagaaggtggcagggcagaaggaaagtcctgtcaggagctcaggctagttcctcagcctgagtcaccctgcagaccagacactcggcctggtgcccagcacttcacgaagggcctagcaggccactcatgggcctcatgccgctgctcgtttgggacaaccctgtgctacagctcggctgctctaccggcccagggcgtaggccttcagagctccaggcccagagcccttctcacactggggataggagagcccctcccctgggaattcagtgatttagggggtccacaagctgtcagaaactggaccacctgctccatccatcacctgctcccatcaggacgcctcctttaacaccttgctaagcttaactgggcttctgtcccccaaaccagcctgccaggctctgcaggccacaccgggcaggcactcaccaaaggactcgttgacgggcagataggccttgaccacaaacatgggggtgccggccacctgggactcctcgaacacgtggccccgcttcctgttcaaaaccccgtagatgccaccgaccacctgctctggacactgccagaagggaaagaaaacctgtcagtggccgctgggcaggacggtggcagggtcagcggtgggcgggtagacctcacctggatctccacaaggtagatgggctccatgaggcgtggctgggcggtcagcacactggcatagaggcagcgccgtgctgtggggatgatctggccccctccgcggtggatggcgtcggcgtgcagggtgacgtcgtggacgtcgaagcgcacaccccgcatgttctcctcacacagtgcgccctgggggagggggagagccaccgtcaagggccggacacacctcggctgcttgccctccacctgccaagtcctgcaggtctccaccagggggacctggggccttgcccgccttggccccattagggtctctgtctcgggaggcaggaccatgaggtccctctagagcctggaaacgggtgtggtctgcacatgctgagccgtgcctcacctccttggtggcccactggaagccggccaccacactgtccttgatctcgttgaggtactgcacacccttggtgatgtcggtgaggatgttggggccggtgccgtcgggcccaaagcaccagatcttgcgggcctcagccacgtcccactcgtacttctcggccaggtagcgcgcccgctgcttgagctcctgacgggcggacacctcgcctttatcgatgtcctcggccaggccgtcggggaagggccgcgccttcatgtacagccggttgtgcttgttgggggacttggagaggcagagcacgttcgactcttcactgaccgtctcgcggtacgagacgaccgggtcagatttctgcaaaaagaggttaagtcccactcttgcctggagaaagaggtgaccttacacacagacgcatccttaaaagcttttcctagcaaggcggacctcatacagcctggtagagccacgtcaatcagaacgaagcggagtcagtgttgcagtgccaagcgcatctcactccagacaaggacaaggagcaggggctccactgagctctccggcgcagaaaccacgggcttgtggaattttaagcattaacagggaagaaacgaggtctggagcaggcctgtcccaacccctccagagcatttgtgttgtttgtggacagaagacagcaggatgtaactcaaaaactgccccggaggccgggcgtggtggctcacgcctgtaatcccagcactttgggaggccgaggcgggtggatcacgaggtcaggagatccagaccatcctggctaacacggtgaaaccccgtctctactaaaaatgcaaaaaattagccgggcatgatggcaggcgcctgaagtcccagctacaggaggctgaggcaggagaatggcgtgaacctgggaagcagagcttgcagtgagccaagatcacgccattgcactccagcctaagcaacagagcaagactcttgtctcaaaaaaaaaaaaaaaaaaaaaaaaaaaatagccctgggccaggcatggtggctcacacctgtaatcccagcactttgggaggccgaggcagggggatcacgaggtcaggagatcgagaccatcttgacttactaacacagtgaaaccccgcctctactaaaaatacaaaaaaaaattagccgggcgtggtagcacgcgcctgtagtcccagttactcaggaagctgagtgaggcaagagaatcgcttgaacccgggaggtggaggttctagcgagccaagatcacgccactgcactccagcctggatgacacagcgagactatctcaaaaaaaacaacaacaacaacaaaaacagccccacatgcctgtggaagactgcaaagaagaaacttgaggaacttaagaagctgagaccaagaccgagatcaagtctaggcgtctgcagagcctagctcagctcagctttaaagcagagggcaggtgtccggggtggggcgtggggaaggctggtcactggcgcctcaccttgatggggatgcaggcgtggtcctcctccaggtccttcaggcagatctccaggtgcagctcgccggcgcccgcgatgatatgctctcccgactcctcgatgatgcactgaaagggatgcgggtcagcaccaaaggggtaggcggctcggaacaggcgggaccaggctcccagcttccctttagctagggaccccgccagaacaagatttcagggaaggtgctgggaaactgggaccagcacaaactcctgaagaaatgttaagtcccacaagctacagtgaacacgcgcagagcagcctaggagagggtggtggctgcctgggcaggagtctccatttacagccacagccaagaacccctcctttcatgaccagtcaccccaatccaccaaccacagcaacccacacagccacaactcaggacacaagccgtcccccctcagggtgtctgctcccagcaggtgcactccgtgcccacctgcaccatggggtcggacttggccagccgcttcagcccctccaccagcttgggcaggtcagccgggttcttggcctccacggccactctgacaacagggctgacgctgaacttcatcacccgcatgttgtgcgcgtgctcgaaggtggtgatggtgcccgtcttcaccaggaactggtccacgcccacgaggcccacaatgttcccacaaggcacatcctcgatgggctccacgtagcggcccatcatcaagattgttctggaagaagcagaaggcggcagcaggccgcagggatggttgtgctggaccctggagggccagggcaggtccctcccggagttggtggccctcctgccaggtcccagggcagactggtggcttccacaaggccctgactgctgcgtcggggctgtcaggaaacatcctcttcagaatcactgccctcctccctgggtatgggtcgacggccgccacccacctgtgcccagggacacagatgagcaggggtgtgctgtgccctggggcttggagcttctccagaaatgccctcactgggctaagaacaaaagttgtggctggcacaagtatcaccctatattccttctatgctccttacttctagctcccgactgaggagcccaagacttggagcagggcagggcccgcaacagtgccaaggggcctgcacatcacccagctgctcacctctggattggcttcaggtagaggtcctccttcttcccaggggtatagttgggccccatgatcctgaccttcaggccagtggagaccagccccgagaagactcgtccaaaggcgtagaaccgacctttgtcggaggttggcaccattttggaaatatacatcataagagggcctttggggtcacagcttttaatgcctgagggacagagaaaacccgcaagctttattccagtgcagctcagccttctggaaccctgcaacccacaaccttgggcaacaggaagtcatccggctgcatctcagggcccggccaccgggaccacgtacccatggcagcctcgtcgtccgggggcccctcgtacaggagctcgcagcggtacttctgggccgtcacaggggagggcaggtggatggtgatcatctgcaacaaggcgtctccggcaggcagccagcggcgcatcacagcctgcgggggcagagagcggtgcatgagacacctggggagcccaggatggccccaccccgtacacgcttcctctcttgaagccaaggaagccaaagtcaggactaacgttctccaaagcacagtcccttctggaaggcggcaaaggccatgcacactcctgccaaggccctcacccacacctgtcccggatggggctggctgctgggatgtgtctccagcagcacccagagtctaaagcgaaaggggcagcagctgtccctgcccagctgaggacttcagcccccaggcctgggctgtcagagcatccggaaacagcagcctgtgttccctccaccccgagggctgggcccaggccgcaccttcagcaggggtttgccttctttgtccttgtcctcgctgtccagtttgatgtccagtttctctatcagttttgctgtctcctctttcttgaaattcatgatcgcatcaaacacctacattccccaccaagaaacaagaaagcccatttgggaacagcaggaggaagcctggcactgcttcctgcttggaagactcaggtcagcgcagggggacgcagcacgggagcaggagcaggcctggcctgcctaccacgggcccagccagctgagcggatcgggagctggaggaaacctcgtggtggagcagaggaaaaagcccactctgactcagacaaggacccaagttctgacttacaagcactgaaccgccaaagccacaagttattcaaccccctcaatgcaggagaggtcccaaggctctggctatgcagtccagatcttaagagaggagccctgactccacctcagttaggagctgtgcctcctcccatctcgcatctgccccacaaggagacgggcccagtcagccgacaggctaccggccggagcccacagggccgagggccaatagtcgcatcggcggggtgcctggcgcagccctcactcaccttgaagatggggtccaggatcagctggcagaaggtgcgtggcagcttcttcccttcggggctggtggctgacttgctgaacttgccgttggctgggtcaaagtacctggcaaggagaggccaagccaaatcaagttagggtctccaggggatgacttggggagggtggtcgccaaggggacatgcttgggcaagacctggtgggcttgagccacgctgtgaatagcacaccacgcccctacgtcgctgccactacccccaggtgtcaggaatcccccaccatatcccgcggggctcacctgtcaccccacagcttcttcatcatgtcctctactttcttggcccgctcggcaggccccaactggccctcccccttggcggcgaacttggccacatacatctcggcaaactgcttcagggtgaaggcccacccgtggaggccagacccaaagcccacggtaccgaggacaggatcgatctggaagtgtgagaaacgagaagcagccgtgagggcccctgcgcagagcctgaagctacgggctgggcgccttgggcatgggcctcagacgcaggctttcttcagtagacatctggtcaaagtgaagaaatgatcagtcatcacgaataggggggccagcccctccaccacccagggcagcgttccctgagctcgtctcttccagctgcccaaagatcaagggctgggtcaagtcggatgaaaacattccagcccccttctctgtcacccaacattcctggcaaaaacacacttccagtccccctcagctcaactccactccccaccggctcctgcagatcccgctgcggcaagcccaccacccagctagggagggccgtaccatgatgttgcccatggggccgctctcgccctcgccgtaggtggagatgatgacgttcacgttctccacgatgcgctggaaagtctggtagagctcctcgggctccagctgcagctccagcagggcgcggtccatcttgttcatcatcagcacaggcttgatgcgctcggcaatggcctgccgcagcactgtctccgtctgcacgcacacgcctggggacacgggggacagggcggcgctgtcatcctcaagcaaggatggcccccggttccaggccgtgcctcagggggacccactgcttacctgacacgcagtccaccaccaccaatgcgccatcggtgactcggagggcagcagtcacctccgaggagaagtcgacatgcccgggggagtcaatgaggttgatgaggaagccggcaccgtccttgctctgcttgatgaagttcaagtcattctccgagagctcgtagaagagggagatggcactgatggagggagggactcgtcagggggacaggagccacacacctggcccagggagtctgggatgctgtcagaagccaggctgctcctccctccatgactcatccctggagaggctcccacaagagccaacccacccttgtcctttgcctctgtccgagacatgccacccccatgacagggaactcctggtaccagccccatagccagatcctcagagccctcctgaccagacatcctgccccaccgacttggtcccaagattcatcacacctgactcaaagtagcaactaaaagacccagcaggacggcaaaagcctccagagactccgaccctcccctcctcacttctgcccctgctccaggggaaatgaagagccttagccagagtccctcaccaatgtaccaacccaggacaaaaagcagttggggtcaccgtactctgcgctccccctactcatatcggggccagaaactgacatggaatgaacatcatccagtgcaacacaggagcttcccagcgtcccaagcactagaacaccctcccctcccaggtgtgacagccaaacctctccagatattgtaggagtgggggcaagtcccccagggagggagaaccacggagttaagccccctcctcaagaaaaccttccagctcgcagtaccccgaatccctgtgcctctccatcctgtctcgctggactgaacctcactcattctcccatgaattaagaaaccaggggaaagagacgttgccaagtctctccccgcgcaccctggcccagtggcctccagctgccaggccagcacctccctgcctgggtacagagggcacagggagctcacgttgacttgatggtgatgcaacgctcctgctcgtccttccgggtatcagtgaagcgtgtctccccggcccgggccgaggcgatgatgcccgccttgcacaccagggagtctgtcagcgtggacttgccatggtccacgtgggcgatgacagacatgttgcggatgttggccttcttgtccatgatggcgcggatctggtctaccgtgaagttcacctgggcaagacaaggaggctcagaccagctcgtgatttccaggaacacagcatggcacggagcgttcagtccaaacgaaccagcatgcccaaggccaggagggggttggtgctggggtgccccaagcccaccgaatcttgccagcctaacaccccttaagagccaccccgcaatctccaaggaaccaccgttaataggtgtcattcatgattgacaacccagaaataaaagtgctcaggaataaaactgagtgtcaacagatttccttgataccaggtacaaatactaaagtctcatttggggccaaacacgtaagggatgaatcctctcctaaagccccctccacgttgtcaccgggccacccaaacttccccgagcaagaagcttcatcataaaatgcaaggtcaccccttggcaaacgggatcagacaaggccacccaccccaggaaataacggggagccggaacggccctaactgccacaagcctacacctcgtgtctcaataagagtctttgtacatctgggagtcataggaaggacaagtgcctaaggtcgacgattaacagcatcaggagaaggtatttggaaggaaaaggggagcctttcaggtgtcgctttgctcgttctgccattccctgccgcccctagtcccccggcagaaaatcgatctcaaactcgcggcccgcgggttacataaggcgcctccctgtctccccgcttccaccgcggtgcccgccattactacgcctgccacatcatcattccccacccccatccccgctaacaacccagctccaaccaggtctgggcaaggttatggcgccctcggaaacggagaaagggctcggtgaacagcgcggcgcacagacatggcggcggccgcttccccagccccgggtcctccggccccgccgccgctacgtctcctcctggcacggggggccccagcgtcccaggctaggcagcgtaggccccgcggaggccccgccgccgctccggggcaccagcgaggcagggttactcaccatggtggcggatggcggtggattctcccaggtagaaccgaaagaagcgagtcgcgccgaggatggcggcgacgacggcggaagagaacgctgacgtcaacactcagctttttataggcggacgccggttgggcgggtcatgtgactgcgctgcgaaggcggggcgaagggacgccgcgcaagcgcacggaggcgtgtccccccgcccgttaacccattcggcgccggcgcggcgctctagaatagaagctgggcatctcgggggcggtggtcgccctcggtgtgcagtgttcaggtgcacaaagtaaagagcgccgttttagctgagaacgagaaccatagcaacgatattagcttacaagttgtccagtacttctattaaaaccaatttacaaggtgaatagagtctgtggattatacccaagtcaatttccctgtttggacattgttacgtaagacgatacccctgggagaagccgagggaaaaaggacactcgcgaccactatactgtttttgcaactccttacctgtaattatttctaaataaaaactttataagaagcaggcatcggaatcactgatcccacaaatgcatactgagcatctatacaccaggcattgttaggggttttgtagatatagcagtggaccaaacaccttgctagcttgaccacactgcgtgttcttctaccagctactaggatttctctgtgcctcaatttcacctgctcggaggtgatcaataccaccctattgtttgggggagagtgaaacgaactaaagacatctaaaagaattaggaccgtgcctgatacccaacgctcaataaacgctatctattttaattagctaagattgctattaataaaacagttatttatttcaggactggtttgccatgtcccaggcacccggctaagcggtttactggcacaatttcattttctatttcatttcctctccagggggaggcgcaggaagactgtttagcatttgtgtcctaatctgaccctaagaaacagttgaatgtatttcatatctcatgaattggcattcaattgtgtaactctatcccttatgaaaagcccaacccgctgtttagcacatagtaggtactcagcatttcttgcatgaatgatgttctcacagtgcaaatgaaccccctgcggtacatctttccttaaactcactttgtgaaacaggagagccactgcagtgcttttcctgggctgggagagggggaggtgtggatccacaaaaagcaatgcaaattccagcctggactctaaaataaacctgtacactcctccccctcacgaatgcttcgggcactttgctttacaaagcgctgtctcaaccttgggtttcatttaacggatgattgctcttcctatcaccatttaacccagtggaaaactgaaaagtatcttccgaaaggattgaggctctgaaaggcagagggcgcggcagggagcagatgggagcgcccggggtccctaaccacctacacctgtacctgtgacgcgtttagttaagttgcaagtcaagcgcatgcgccatttggggcatgagtttttagcagaggggtagtcagtttcgcattattaataataaaattcttcaaaatttttaaatgcactgagcacctgctacgtgttgcgtttcctattgggggcttcgcagccgttttttccgtgcaaagtgggagcatttcagagatgtaatggaaaggttttcattaaaagaggtgtcaggcgagaggcggaggttgcagttagccgagatcgcgccactgctctccagcctggcgacagagcgagattccgtctcaaaaaaatttttaaaaattttaaaaattaaagaggggttaggctgcttgcggtggatcacgcctgtaatcccagcactttgggaggccgaggcaggcaaatcacctgaagtcaggagttcgagaccagcctacccaatatggagaaaccccgtctttactaaaaataaaaaaattagcccggcgtggtagtgaacgcctgaaatcccagctactttggaggctgaggcaggagaaccgcttgaacccgagaggcagaggttgcagtgagccgagatcacggcactgcatgcactccagcctgtgcgactgagagtaagactctgtctcaaaaaaaaaaaaaaaaaaaaaggagggggggctgttcacaggtatcccggaacttaataaaagaggggttgaatttcttctcaagtgcatgggttgcttattgaaaaattctaacatcatgtaatttaaagaactagggggagagcttaagggaaaaaggggaattttcaaccccataactgcagggatggagccaggtgttggcagggaaggatctctcccactgtcatccccacatccatgaagagcagaatcctggagtaccacaagcagccacaaccaggtcagctgtaataagtacaataataaatatacgctgggtcttttagggtggggaccaataaaaaaattcacctctgcagagaagctccgctgcgcatgcgcctgctgcggcgccaggagagctcagagaccgcagtagcggcccctgctgaccgacagtcgccagtgcaggcctctcgacactgcctttttttttttttttttttttttttttaagaccaagtctcgctctgttgccacgctggagtgcagtggtgcggtctcagctcactgcagcctccgccacccgattcaagcgattcacctgcctcagcctcccgattagctgggattacaggcgcctgccaccacacccgggtaatttttttgtgtttttagtagagacaggggtttcaccatgttggccgggctggtcttgaacccctgacctcgtgatctgcccgccttggcctcctaaagcgctgggattacaggcgtgagccaccgcgcccggccaacactgtcttttaacagtttattgagcgtttactaggacctgacctcacggtcctttaaatcaaatacttcagctaacctacccacaccctgggcttcgggtggcctcctttacgcctgagaaaatggagactcagataagttaagtcatttgcccacgttcacagagctagtaaaggtgcagccaaatccgactcaagtagtggtttaatcgggaaggagcccggtcctgcaaccgttgtctagatgcatttcagatttgggaaaacgggccgggcacggtggtttatgcctgtaatcccagcactttgggaggcagaggcaggcggatcatgagctcaggagattgagaccatcctggccaacatggcgaaaccttgtctctactaaaaatacaaaaaaattagctgggtgtggtggcacgtgcctgtaatcccagctactcgggaggctgaggcacgagaatcgcttgaacctaggaggtggaggttgcagcgagctgagattgtgccactgcactccagcctgggtgacagagagagactccgtctcaaaaaaaaaaaaaaaaaaaaaggccgggcgcggtgggtcacgcctgtaatcccagcactttgggaggccgaggcgggcagatcatggggtcaggagatcaagaccatcctggctaacatggtgaaaccccgtctctactaaaaatacaaaaaattaaccgggcatggtggcaggcgcctgtagtcccagctactcgggaggctgaggcaggagaatggcgtgaacctgggaggcggagcttgcagtgagccgagatcgcgccactgcactccagcctgggcgacagagcgagactccatctcaaaaaaaaaaaaaaaaaacaaaaaacgtggtggctcacgcctgtaatcccagcactatgggaggccaaggcgggcagatcatgaggtcaggagttcgagaccagcctggccaatatgatgaaaccccatctctactaaaaatacaaaaattagctgggcatggtggcagacacctgtagttccagctactcgagagactgaggcaggagaattgctggaacccgggaggtggaggttgcagtgagctgagatggcaccattgcactctagcctgggcaacagaccaagactctgtctcaaaaaaaaaaaaaaaaaaagtggattttgtcttttagatgattaaacaaatgggttcagggaggcctggtgagtctgtgtagtaagaacaggcgcaatggctcacgcctgtagtcccagcactttgggaggcggaggtgcgtgaatcacttgaggtcaggagttggagaccagcctggccaacatgacgaaaccccatctctactaaaaatacaaaaattagccgggcatggtggcaggcgcctgtggccccagctactcaagaggctgaggcaggagaattgcttgaactcaggaggccgaggttccagtgggcagagatcacgacactgcactccagcctgggtgatagtgggagactccacaccctgaaaagaaagaaaaaaggccgggcgcagtggctcatgcctgtaatctcagcactttgggagaccgaggagggcggatcacaatgtcaggagttaagacaacagcctggccagcatggtgaagccccgtctctactaaaaatacacaaattagctgggcatggtggcgcgcctgtagtcccagctactcgggaggctaaggtaggagaatcgcttgtccccgggaggcagaggttgcaatgcgcctagatcgcgccactgcactccaacctggacgacagagcgagactccatctcaaaaaaaaaaaaaaaagaaaaagaagataattgaaacaattaccctcccaggtagaaagtccctgctgatggggtgcatctgttcagcagcggtgttgagagctcaagctctttttaacgctttgccttgctgtctccaaagtattgccttcatcctcatagttcaaagtgtccaccatcacattcacgtttcagccaataggaagaaggaaagagaaaaacaggaaaagagtttacatgccactcctgctattggtcagaatgtgtcacgtgaccatactcagctgcaagggttggtgggaaatgtagtctttttttctgggaggccatgtgttcggcttaaaattgtctttttttctttttctttatttcttttttcttttctttcttttttttagacggagttttgctcttgttgcccaggctggagtacagtgacgcgatctaggctcactgcaacctccgactcccgggttcaagcgattctcctgcctcagcctcctgagtagctgggattacaggcgcacaccaccacgcccagctaattttttgtatttttagtagagacggggtttcatcattttagccaggctggtatcgaactcctgacctcagatgatccacctgcctcggcctcccaaagttcagggattaccagcgtgagccaccacgcccagcctttttctttccttccttccttccctccttccctccttccttccttccttccttctcttcctttcttccttcgttccatccttccttcctttttttgttccttctctcctttcttccttcttttttttctttccttacttgttgtttcttttttcttttcttttttgtttttctgagacagagtcttgctgtgttgcccaagctgcagggtgcagtggtgcattcatagctcattctagtcttgaactcctgcgttcaagcaatccttctgtttcagcctccatattggcaggcacgcaccaccacatccaggtaatttttaaatttttttagagttagaatctcactatgtccccgaggctggttttgagctcctaacctccaggaaccctcctgcctctatcgatttcttttattttattttttgtagagacagggtcttgctgtgttgcccaagctggtcttgaactcctgggtccaagggatcctcctacttcagcttcccaaggtgccggatgacaggcatgaaccattacactcagccagtttttttgttttccttttcacaaagcaccaaagaagaagcacagttgtgttgtttgttgtttttttgtttgtttgggggtttttgggtttttttgagatggggttttgctcttgctgcccaggctggggtgcaatggcgcgatctcggctcaccacaacttcttcctgggttcaagcgattctcctgcctcagcctcccaagtagctgagattaccacgcccggctaattttgtattttttgtagaaacggggtttttccatgttgatcaggctggtctcaaactccggacctcaggtgatccacccgccttggcctccctaagtgctgggaatacaggcgtgagccaatgcacccggtctaatttttgtatttttagtagagacggggtttcaccatgttggccaggatggtctcaatctcttgaccttgtgattcgcctgccttggcctcccaaagtgctgggattacaggcgtgagccactgcgcccggcctttttttttttttttaattgagatagcgcaatctcagctcactgcaacctccctttcccaggctcaagcaattctcctgcctcagcctgttgagtagctggaattacaggtggccgccaccacgcctggctaatttttgtatttttagtagagatgtggtttcgccatgtcagccaggctggcctcgaactcctgacttcaggagatgggcccaccttggcctcccaatgtgttgggattacagatgtcagccaccatacccagccttttttttttttttttttttttgagatgaagtctcactcttgtaccccaggctggggtgtaatggcatgatctcggctcactgcaacctctgtctcccagaatcaaatgattctcctgcctcagcctcccgagtagctgggattacaggcgcctgccaccacacccagctaatttttgtatttttagtaaggacagggttttatcatgttggccaggctagtctcgaactcctaacctcaggtgatccgcctgcctcggcctcccaaagtgctgggattacaggcgtaagccaccgcacctggcctgttttcatttttaaactttttttcttctttcaacttattttaagatctggggtacatgtgcaggatgtgcaggtttgtcatacaggtaaatgtgtgccatgattgtttgctgcacagatcaacccatcacctaggtattaagccccacatcccttaactattcatcctgatgctctccccgccccccacccccacgtcctaaatttttttttttttttttttttgagaaggagtcttgctctgtcgcccaggctggagtgcagtggcgccatctcagctcactgcaagctccgcctcctgggttcacgccattctcctccctcagcctcccgagcagctgggacgacaggcgcccaccaccacacctggctaattttttatatttttagtagagacggggtttcaccgtgttagccaggatggtctcgatctcctgacctcttgatccacccactttggtctcccaaagtgctgggattacaggcaggagccaccgcgcccggccaattttttattttttgtagagacagggcctccctacgttgcccgggttagtcttaaactcctggacttaagcaatcctccagccttagctgcccaaagtaagggtatacaggtgtgagccactgggcctggccaacatttcttattctgaaataattatagattcaaagggagctgcacatataggacaaacaggtcctacgtgcctgtcaccaagcttccctcagtggtcacatcttatgtacaacatccgaacaagaaatatgacattagtacaatgtgtgtatacatttccaagttattgtagctggacactgtggctcatacctggaacccagcactttgggaggccaaggaaggaggatcccttaaaaccaggagtttgagaccagcctgggcaacatactgagaccctatctctaaaaaaaaaaaaaaaaattagctgggggtggtggcacatgcctgcagtctcacctcctagggaggcttgagcccaggaggtcagggctgcaatgagctatgatcatgtcactgcactccagcctgggcgacagaatgtgactctgtgaaaacaaaaacaaaggctgggcgcagtggctcacgcctgtagtcccagcactttgggaggctgaggcgggtggatcacctgaggtcaggagtttgagaccagcctggccaacatggtgaaaccctgtctctactaaaaatacaaaaattggccacgcgtggtggtgagcacccgtaatcccagctacacgggaggctgaggcaggagaatcgcttgaacccgggaggcggaagttgcagtgagccgagatcacgccactgcactccagcctgggcaaccagagcaaaagtttgtctcaaaacgtatgtataaataaataaaacaaaaacatacagaactatttcatcaccacaaagatcactcttctgttacctccctattgtcacaactattcccctccccatggccctgccctgatccctggaaacaactgacctgtgttccagctctataattctgtcatttcaataacctttttgttgttgttcttgttgtcattgtttcgagacggagtctcactctgtcgcccagctggagtgcagtggtgcaatctcaactcactgcaacgtctgcctcccgggttcaagtgattctcctgcctcagcctcccgagtaactgaaattacagatacccgccaccacatccagctaatttttgtatatttagtagagacaggctttcatcatgttggccaggctagttttgaactcctagcctcgagtgatccacccgccttggcctcccaaagtgctgagattacaggcgtgagccacagtgcccagcccagattggcttttgccccccactcagcagaatgcccttgagaccctcttgtcctttctaaattaatggcaatataataatatttcacaattcctgagggcttactgtgtaccagacactgagctaaatgctttatggccctacaatcaccctgtaaaatagatacaatttgtggtgcccagcctgcacgattgtcccaacgaatctgccctcctgacatccgggtatgacctgctcacattgaacagggctgagctttataggatgttttgaaaatgggagcgtgcaggccgggcgcggtggctcacgcctgtaatcccagcactttgggaggccgaggcgggcggatcacgaggtcaggagatcgagaccatcccggctaaaacggtgaaaccccgtctctactaaaaatacaaaaaattagccgggcgtagtggcaggcgcctgtagtcccagctacttgggaggctgaggcaggagaatggcgtgaacccgggaggcggagcttgcagtgagccgagatcccgccactgcactccagcctgggcgacagagcgagactccgtctcaaaaaaaaaaaaaaaaaaaaaaaaaaaaagaaaatgggagcgtgctgtttcaggttaggctatacaagacatcgtggcaggtcccagtagctcacatcgtaatcccagccttttggaaaaggggaggattgctcgaggctagcagttcaagaccagatttggcaacatagggagaccccgtatctaccaaaaaatcttttttttttttttttgagacagtgtctcactctgcagccaggctggagtgcagtggcacaatctcggctcactgcaacctctgcctcccaggttcaagtgattctcttgcctcagcctcccgagtagctgggactactggtgaccagaaccatgcccagctatttttttttgtatttttagtagagatggggtttcgccatgttggccaggatggtctcgatgtcttgacctcgtgatccacccgcctcagcctcccaaagtggtgggattacaggcgtgagccaccgcgcctggccctccagaaaccttttttaataagctgggcatgatggtgcacccgtgtagtctcaactacttgggatgctgaggcaggagggtcacctgagcccaggacttttttgtttttttttttttgagacggagtctcgctgtcgccaggctggagtgcagtggcacaatctcagctgactgcaaccctccaccttctgggttaaagcaattctcctcatctctacaaaaactgcaaaaaaattagctgggcatggtggcgtgtggctataaaaccagctactcaggaggctgaggtgggaggattgcttgagcctaggaggcggaggttgcagagagccaagatattgccactgcactccagcctgggtgatagagtgagactcagtctcaaaaagaaaaaaaaatagtaggcgggtggttattcctatgaaagagacttctgtgtccctgagaaaatgccctgagggtggggtggtgggagagagaacaaattccttaactcccaattcaattatttacttatttatctttagacagcatctcactgttacgcaggctggagtgcactggtgtgatcatagctcactgcagcctcgacctcccaggctcaagcagttctctcacctcagcctcccgattagctgggactacaagttcacgccaccatacctgggttttttgttgtttttttttaaattgagatggagtctcgctctgtcgcccaggctggagtgcagtggcgccatctcggctcactgcaagctccgcctcccgggttcacaccattctcctgccacagcctccccagcatctgggactacaggcgcatgccacgacacccggctaatttttctgtatttttagtagagacagggtttcaccgtgttagccaggatggtctcaatctcctgaccttgtgatctgcccgcctcggcctcccaaagtgctgggattacaggtgtgagtcaccacgcccggccatacctgggtatttttaagattgttgaagagatggggtctatgttgcccaggctggtcttgaactcctgagctcaagcaatcctcctgcctcagcctcccaaagtgctgggattctaggcctaagccccggcgcccaacctgtcccccaattagattatatttgtttatacaatctgttttatttatttatttacttatttattttatttttttgagatggagtctcgcgtgttgcccaggctggagtgcagcagcatgatctcagctcactgcaacctctgcctctcgggttaaagcgattctcctgtctcagcctcctgagtagctggaattacaggtgtgtgccactatgcccggctaatttttgtatttttagtggagacaggggtttcaccatgttgcgtgggctggtctcaaacttctgacctcaggtgatcctcctgcctcggcctcccaaaatgctgggattacaggagtgagccactgtgcctggcctacaatctgttttagagccagaaaatgcaatcaattgtgataatacattgctatgttttgaaatacatatatacaaacgtgcacacaactttatttaaatttaagatgcttttaatattcagctaacaccaaattcacaatttgatactttttttttttggtaaagatggagtctccttctgtcaccgaggctggagtgcagtgtcctcatctcggctcactgcaacctctgtctcccaggttcaagagattctcctgcctcagcatcctgagtagctgggattacaggtgcgtgccaccacgccccagtaattttttttgtatttctagtagagacagggtttcaccatgttggccaggctggtctcaaactcctgacctcatgatccacccgcctcggcctcctaaagtgctgggattacaagcttgagctaccgcgcccagctcataggtatttttgcccaggaaacaactccatttacttaagtgcaaaacgggagtaactatctgtatctatatctacctctctccatctatctctatgtatcttacataacagtggaggtggtttgtgaattttgtcagaattgcaaaggatctgatttagaactgatgaattctgtcctaaaacaggctgtaaagctttaaattggtcgtgtggggattttccatagcctccctctcctctttcttgtctgtctacctcccatcagtgtctgaacatgttctgtatttagcctttttttttttttttgagatggagtctccctctgttgcccaggctggagtacagtggtgccatctcggctcactgcaagctccaccttccgggttcaagtgactctcctgcctcagcctcccaagtagctgggactacaggcgtgtgccaccacgcccagctaaatttttatttttggtagagatgggttttcaccatcttggccaggctggtctcgaactctgggcctcaggtgatccgcccatgtcagcctcccaaagtgctgggattacaggcgtgacccaccacgccgggacctttaattagcttttgattttgtttgttgttgatctccctcctggaatgccagttccacgaggacagggaattttgcctgttgtggtcaccactgtgtctgagcatctctaacaaagactagcaagctacagccctcagccctaatctttttttttttttttttttgagtctcgctctgtaaccaggctggagttcagtggcacaatctcggctcactgcaagctccgcctcccgggttcacgccgttttcctgcctcagcctcccgagtagctgggactacaggcgcccgccaccatgcccggctaattttttgtatttttagtagagacggggtttcaccgtgttagccaggatggtctcgatctcctgatctcgtgatctgcccgcctcggcctcccaaagtgctgggattacaggcatgagccactgcgcccagcgtattattattattattattattattattacttttgagacagagtctctctctgtcacccaggctggagtgcagtgacacaatcacggttcactgctgcctggaactcctgggctcaagccatccacctgagtaggtaagactgtaggcgtgcaccaccatgcctacttaattttttattttttgcagagagaggatctcattatgttgctcagtctggtgtagaaatcctgtgttcaagcagtcctcctgcctggatctccaaaagttctgggattacacacccgacccacagcacccggccttctttctcttttaaatgttcaaacaaaagcataataataacatgacatgtgaaaatacgtaagattgaaatttctgtgtttatgaagttctactagcatacaggcctggctcagtggttcacacccgtaatcccagcattttgggaggtccaggagggcagatcactcgaggtcaggagttcaagaccagcctggccgggggcagcccccgcccggccagctgccccgtccggaagggaggtggggggcagcccccgcccggccagccgccccgtccgagaggtggggggcgtctctgcccggccgccccgtctgggaagtgaggagcccctctgcccggccgccaccccgtctgggaggtgtacccagcagctcattgagagcagaccatgatgacgatggcggttttgtcgaatagaaaaagggggaaatgtggggaaaagaaagagaggtcagattgttacgctgtctgtgtggaaagaagtggacataggagactccattttgttctgtactgagaaaaattcttctgccttgggatgctgttaatctataaccttacccccaaccccgtgctgaaacatgtgctgtgtccactcagggttaaatggattaagggcggtgcaagatgtgctttgttaaacagatgctagaaggcagcatgctcgttaagagtcatcaccactccctaatctcaagtacccagggacataaacactgcggaaggccgcagggtccgctgcctaggaaaaccagagacccttgttcacatgtttatctgctgaccttccctccactagtgtcctatgaccctgccaaatccccctctccgagaaacacccaagaatgatcaatgaatactaaaaaaaaaaaaaaaaaaagaccagcctggccaacatggtgaaaccccgtctctgctaaaaatacaaaaattagctgggcctggtggcgtgcgcctgtagactcagctactcaggaggctgaggcaggaaaatcttttttacctgggaggcggaggttgcagtgcaccgagatcaggcccctgcactccagcttgggcaacagagcaagactttgtcataaataaataaataaaataaaataaagttttactagcacacagccatgctcatttgtttttcttttttcttttcttttcttttttgagacggagcctcgttctgtcggccaggctggagtgcagtggtgtgatctcggctcaccacaacctccgcctcccggttcaggcgattctcctgcctcagcctcccaagtagctgggactataggtgtgcaccaccacgccctgctaattttcgtatttttagtagagatggggtttcaccatattggccaggctggtctcaaactcctgacctcatggtccgcctgcctcggcctctcaaagtgctgggattacaggcgtgagccaccgctcccggccagccatgctgatttgtttatttatagtctacggtttcttttgcccttagatggcagagttgagtaattgctctagacattatatgtggtccaaaagcagaaaatagttatttcctggatctctacagaaaacgtttgcagatccctgaaccaaaacagtgccttgtatacagtaggtgcttgataatacagaaagattattgtttgcatgtctttttaattttttatttttgagacaaggtcttgctctgttgccctggctggagtgcagtgccactatcacaactcactgcagcctcgacctcctgggctcaagcaatcctcctgccttggcctcccaaagtgctgagattatgagcgttaagctactgtgcctggtcattacttgtatatctgatgtaagaaggggaggtgttttagcctttggagacagctggatgcagattaagacagtggtttaggctgggcatggcagctcaagcccgtaatctcagcagtttgggaggtcaatgtaggaagatggtttgaggccaggagtttgagaccagcctaggcagcagagtaaaactccccctcccaaatctacaaacaaacaaacaaaaaaacaaaacaaaacaaaaaaaggccagatgtggtggctcatgcctataatctcaacattttgggaggccaaggcaggtagatcacttgaggtcaagagttcgagaccagcctggccaacatggcaaaaccccgtctctattagaaatacaaaaattagctgggtgtgttggcacgaacctctaatcccagctactcaggaggctgaggcaggagaacagcttgaacccaggaggcggaggttgcagtcagccaagattgcacccagcctgggtgacggagtgagactctgaatccaaaaaaaaaaaaaaaaaaaaaaaaaaaagatagtggcttagccaatgcctgggcaggtgttcccatctgatactggctttcatcatcacagaatgggggctgatacagacgcagctaacatggaaacaccttattctgacagtttctaggacagggctcagcaatttttttgttgttgttgagatggagtcttgctctgttgcccaggctggagtgcagtggtgcgatctcagctcactataacctctgccttcagggttcaagcaattctcccgcctcagcctcctgagtagctgggattacaggtgcccaccatcacacccagctaatttttgtatttttagtagagacggggtttcaccatgttggccaggctggtctcaaactcctggcctctagcaatccgcctgcctcagcctcccaaagtgctgggattacaggtatgagccactgcaccaggccacggctcagcaattttaggtagagagcatcctgagtccctcctgatccacccttcaggttcaacaattggcaacacatatattccattttgttttatttttctccctcaatactctccccattatttcttttctttttttttttttgagacagagtttcgctcttgttgcccaggctagagtgcaatctcggctcaccacaacctctgcctcccgggttcaagcgattctcctgcctctgcctcccgagtagctgggattacaggcatgtgccactacgcccagctaattttgtatttttagtagagacagggtttctccacgttggtcaggctggtctcaaactcctgacttcaggtgattcgcccgtctcgggctcccaaagtgctgggattacaggcgtgagccacagtggccagcctcttcctgttatttcaatgcaaatcctataccatttcttctgtaaatatgcttggcagttatttgtaactgataaggactcttcattgatttattataattattttagagacagggtctagctatcactcaggccagagtacagtggtgctatcatagctcactgcagcctcaaagtcctgggctccagtgatcctcctgcctcagtctctggagtaggtggcactaaaggtatgtgcctccatggccagctaatttaagaaaaaatttggggtcaggcgcggtggctcacgcctgtaatcccagcactttgggaggccgaggcgggcggatcacgaggtcaggagatcaagaccatcctggctaacacagtgaaaccccttctctactaaaaatataaaaaattagccaggcgtgctggcaggtgcctgtagtcccagctactcaggtggctgaggcaggagaatggcgtgaaccctggaagtggagcttgcagtgagccgagatcgtgccacccagcctgggcaacagggcaagactctctcaaaaaaaaaaaaaaatggggggggagctgggcgcagtggctcacacctgtaatcccagcactttgggaggccgaggaaggcagatcacctgaggtccagagttggagaccagcctggccaacatggtgaaaccccgtttctgctaaaaatacaaaaattagccgggtgtggtagcacgcggctgtagtctcagttagttgggaggctgaggcagaagaattgctggaaccaaggagacggaggttgcagtgagccgagatcacgccattgcactgcagcctgggtgacagagccagactccatctcaaaaaaataataataatttttttgtagagatggggatctcgtgttattttgccctggctggtctcaaactcttgggcttaagcaatcctcctgcctcagcctcctaaagggctgggattataggcttgaagcaggcacccagcccaaaacatattttaaaacacagacacagtaccatgattacacagaaccttcaaaccacaagggttgcaggaatctacaagtgagacaaaatttctctcaactgccaagcacgctgtctcatgcctgtaatctcagcacttttgggagattgaggcaggtggatcatttaaggtcaggagttcaagaccagcctgggcaacatggcgacaccccgtctctactaaaaataccaaaattagctgagtgtggtggcgcccgcctgtaatcgcagctactcaggaggctgaggcacgagaattgcttgaacctgggaagcggaggttgtagtgagctgagatcgcgccactgcactccaaactcggcaatagagactctgtctcaaaaaataataataataaataatagaaccaaacacacacagaggaaggtacatgtaaaaacgggtgcaatcgaaataatgtctgcactcgagttgattccattatactaacatcaacgcccaggttttgacaacataacatggctatgtaaaactttttttgaatcttttttttttttttttttttgagatggagtctcgctctgtcacccaggctggagtgcaatggcgcaatctcagttaactgcaacctccgcctcctgggttcaagctttttgtttgtttgtttgttttacatggagcgttgctcttgttgtctgggctggagtgtgatggcacaatctcggctcattgcaacctctgtctcctggggtcaagcgattctcctgcctcagcctcctgagtagctgagcttacaggctcccgccaccatgcccagctaatttttgtatttttagtagagacaggagtttcaccatgttggccaggctggtctcaaactcctgacctcagttgacccgcccgccttggcctcccaaagtgcagggattacaggtgtgagccatggagcccagccagttataaaaatactatcactggggaaagctgggagaaaggtgcacaaatctctctgtactatttttgcaacttcttgtgaatctgaatcttcaccaaaacaaatacaaattatacttaaaaacaaaacctggccaggtgtggtggctcacacctgtaatcccagcactttgggaggctgaggctggcagatcccttaaggtcaggagttcgagaccagcctggccaacacggtcaaacctcgtctctactaaaaataccaaaaattagccggtgtgatgatgtgcacctgtagtccccactgcccgggaggctgaggcaggagaatcacttgatcctgataggtggaggttgaagtgagccaagatcccaccactgcactccagcctgagtgacagagagagaccctgtctcaagaaaattaataaattaaataaaattacaaaaatgagccaggtatggtggcacacacctgtaatcccagctattcgggaggctgaagcacaagaatcagttgaacctgagaggccgaggttgcggtgagtcgagattggcaccaccacactccagcctgggtgacagagcaagaccctgtctaaaacaaaacaaaacaaaacaaaaacaaaaaaacccaatcccccgcagaatcagcagggccggaatgaaggtaagactcatacgtgcaatggcagagctggggttttgctgtcaatggacaacatttcaacaaatctaaggaccttaaccggcttcattgcaatttgctacacttcattccataaaataggataactgttccaatcagttgggcagaggaggttggctctacaggaagagaggggttgtagagagcaaaatcaaagaacaggctgggcggggtggctcatgtctgtaatcccagcactttgggaggatccccgaactcggaagtttgagagcagcctgggcaacttggcaaaaccccatctcgacaaaaaatacaagaattagccaggcgtggtggtgtgcacctgtagtcccagctactcaggaggctgaggtgggaagatcacctgagcccgggcggttgaggctgtagtgagccatgactgagccactgcacaacaacctgggagacagaaacctatctcaaaaccaacagcaacaacaacaacaaaaacccaacagcaaagaatgtgttaactcattagtgttaccatcaggttgtttcaggctagtttttttttttttttttttttttgagacggagtctccctctgtcgcctaggctggagtgcagtggcgcgatctcggctcactgcaagctccgacttccgtgttcatgccattctcctgcctcagcctcccaagtagctgggactagaggcgcccgccaccaagcccggctaattttttgtatttttagtagagacggggtttcaccgtgttagccagggtggtctcgatctcctgacctcgtgatccacccgccctggcctcccaaagtgctgggattacaggcgtgagccaccacacccggccaggctagtttttttgtgtaaggattaaagaaattaagcagagggaattttaggacattggccactgaaggctgaaactggcctgtttggaaaattggttggccggatcatctaaggtcagtagttctcgactagtctggccaacatggcgaaaccccgtctctactaaaaatacaaaaaaattagccgggtgtggtggcgggcacctgtaattccagctactcaggaggctgaggcaggagaatcgcttgaacctggaaggcagaggttgcagtgagccgagattgcgccattgcattccagcctaggcgacaaatgtgagactcctcctggaaagaaagggagagagagagagagagagagagagaaagaaagagagaaaataaaataaaagagaaaatgggctgatagggctccctcctggttttcccaaaggtcagataacaacttagcttcgtcattgtgacttagaatctgagtgtgactagctgcattttgtttattcctgtgtcttggtgcctagcacaagagtttagtctaaaacaaccgcctcctataattttgtcgcccaggctggagtgtagtggcatgatcaaagctcactgcagcctccaactcctgggctcaagcgatcctcctgcctcagcctcctaagtagctgggaccacaggcgcacactcctacgtctggctctttacttaaaattttggtatttcaggccgggtgcggtggctaacacccatgatcccagcactttgcgaggccgaggccggtggatcacctgaggtcaggagttcatagaccaacctgaccaacacagtgaaactccatctctactaaaaatacaaaaatcagctgagcgtggtggtgcccacctgtagtcccagctactcgggaggctgaggcaggagaatcacttgaacccgggaggcagaggatgcactgagccgaaattgcgccactgcactccagcctggcgccactgcactccagcctggtgacaaagcaagactccgtctaaaaaaaaaaaaattagctgggtatggtggtgcatacctgtaatcccagctactcgggaggctgaggcaggggaatcgcttgaacccaggaggcagaggttgcagtgagtggagatcgctccattgcactccagcctgggcaacacagcaaggctctcaaaaaaaaaaaaaaaaaaggctgggcatgatggctcatgcctgtaatcctagtactttgggaggttgaagcgggcagatcacttgaggtcaggggttgcagaaaagcctggccaaaaaaaaaattagctgggcgtggtggcagtcgcctgtaatcccacctacttgggaggctgaggcaggagaatcccttgaacccgggagatggaggttgcagtgagctgagatcgcgccattgcactccagcctgggcaacaagagtaaaactccgtctcgaaaataaataaataaataacaatttggtatttcatccatcatggactcttttgcactgatttttttatgtttaaagtgttggactagccaggtgtggtgactcgcgcctgtaatcccagcactgtgggaggcccagacagaaggatcatttaagcccagacattcgagaccaccctggataacataatgagatcctcgtctctacaaaaataaaaataaaaaataaattgcactaaaatacttgattattgaagtttgaaatccacttctacgggcacgaagccacttagctccaaagccaaggagcgctttggagaagaggtcccaactggtgcagatccaaggtttcccatgggtggggaggcaggatggggggggcgcctgcaaagaggtgagggctgtacgatctccaaggaatttgggagcaggggtcccgcttttctccgccgggcgcccccagccagctggttgccgagcccacgccccatctgcacaccaggacccggatgtgcagcgcgcggggtgtctgggcccgtggagcctgcaccgcgctgcgctgcaaggcgcctcactgtacgcactggcggccgttgcggcggagcaaccatcccctgcccgacgccgccgggagtctggagacgcacctggcggccgccgcgcgcaggaagccacggcacctagctgcattgttgtcgctgccaccgccccctctcgccttccctccctagaggaaaccgagcacccgtccccacctgcgcagggctagtaccactttaaggagtcaggcgccgccggggtaggcgtggtcgccgcgagcgggggggggggcgctggtgtaggacggacctgattggccggaggcccgggcggtggccgcgcgcgcctgcgcaggaggcagcagcgcgcaccggcggcgggaggagcgcgcgcgggtgctaattggcccgggcggcggccccgcccgcgagtggtgagcggtcacgtgacgcgacggctgggggctcccggcgcgggggacgctggtgaccaagatggcggcggagctggtggaggccaaagtgagtgagcggtggcggcgccggccggggcaagtgggcgagagggcgggggccgggccgcaggtcgaggtctgcgccttctgtccggggccccacagcgcggccggcccgcggctcgccgtcccggcccccagaccccgacccccggtctcagggtgagggcggggggcggggaggccgggggcggggccctcctgcctcacccaggtcttcgcgccgggggtcgctcccccggcttcaggcagggtccccccacccagcccgagcccttagggtcccggtccctgagcgccaggccagggccgcgcctcccggttgaggcaccgtcccgccgggatgcgggacgtgttgagctactcgttgccctcttggttccgagccggggtccttgctttttggctggtgtgttggggggagtgtctgcgcctccccgcccacagggctcccaggactgctatctgggtctcgtccccgcccaacaggccaggctggggtttgcgagtctcctgctcggaagggtcccccgagtcctggatagtgtcctgccaccgtccaggtggaggagtcagggccctgagaccacccccaagacacggcacgtcctcttggggtctggagttcaggctcggtcttgagcccctcttcagctcctgcattggtcccagaaccccgcccccttcccgacaccgtctctcacacgccggagtgggcgcttgggggaaggctgggccctccctttccctccccataggatggagttcggaccactcttcttggtcacagaccttctttattctcctttttttaatcttaaatcctggactgtgctttggtcctacctcgttcctctcgggacagaatctgaggctactgattctgcttcagggggctctaaacctcacctgtgcagcatcagatactgtcctcaaaccttggctgcttctcctattttctgctcttgagcgagtctacttcttaggtcagacacccaccctccccctacacagcccccagaacttttatgcaccccaactttggtttctaaggtcccctctctttctgcctattctcttttgttgatctctggagggtccccactgggtccaaggctggcctctttagaacaactgttgctgctgctctattatactttgggtcctgtccaggtcccatgtcccatagataccatctcctagcttggaaccacttttaatcatcctgggattgagctcagagtatccccattccaggggatgtaccttcttgtaggtgcctacctagagctgagggtctaaaacccttagaagtgcccgcaaggccacggcttccggggaggttaggggacctctccctcccccatcccctttcacatcttccctccccacggtcctgacctgtacgtatcttcttctcggtcctctcacattaccccctgggatctgaaaacacagcactcagggctctgtgattatagcatatacctctcttcgcctcccaaccctacacccctgcgcacacttctgctcctctctagagttttgaaaagtggagactcgccctggagatgtggaggcctgaactctgtaaacccaaagtggcaggctctgggcttgaagtgtcctggagtcctgaaatgtaacctcccgtttcggggcttggagctgtgaccctggaccccaacccccaccctggctgagggcagggtctgcactcttttgtaccatccaggccttgaaatatgatctgatgaactttccttaaccctctggtggctgggcccccccccaccccaattaaatcaagttgacccttctttcaggttctctaaaccgtgagcctccattcaagggggcctggaccctggggaaccttctttctccttgagtctgttgctacctctccaagtaccttaaatgtcattgaaacatccccttctttacaggggccttccccagcctgtcatattcatggctgcagattctgtcttttggggtgcatcacagactgctcggaggggcgaatgttgggggtttgttggtgaactttgaaatctgagactctcagcttgaggcctgcaggcgggtttggggcaggggtgtctgtgagctccctgaaatagtccacagcgtttcgcacagatctccgctttcctggagagaggcgccttcctgagctacccccggtgctctgaggggcctatgctggaggaaaggttcagcgcagctgctgtgtctcggctgatgtctccccatgcgacttccaggcaagcctggagttgaaactctggaagctgccggggcctggcactgtttataaacacagctctgacggcaagcaggtcagcttgaagccagggcaggaagtgatcttggggcatttggggcttcttcctgaatgcttgtcccccccgcactccctccagtgtcaagggcaggctcctccgaggtggcagctgctgggaaatctgagtcgtgaacatatggccacctaaggggtgtgctccgggaagcgggagctgcggctccactgtccagcctgggtggggcaggggctcccggggtgcgaggatgtcagcaggttccccagcccacctgccttcggccagtctgccagtgtgaagtgtccacatgacatcgtctctccctgctaaggctttgggccacttccagaagaaacatcttgtctgcaagcctttttgttttctgcacaaggtaggaagtcaggccaagggagatgaggcatttttgttttcaaagcatccctgactctcaggcccagcagaccatgcaggtccccatagccagtgtgctggtgagtgagggtcccccgggcagcagacgggaacacccttgggaggccagaggccgaggggccgatgccagtcccacgcatgtactagggaggctctgggccagcctcttccctctgtgagcctcggtttcctcacctacacgatgggtgtcctcattgtgaaattagcgacacaggccttgctggtgcctggtagggagcaagacgctggcatcccgattctttacagtcacggggccccgcagccctgatatgggaagaggcttctcccgaggctctttgggcagggctgggccgcctgcacgtgtgtccctgtcattttgagcctggacagcctctccgtctccaacaggaccctggcccgatacagctggaagaaatcagagctgacagatgaggacccgacagtgggccccggctgctgcagctttggtgctgaaatgtgcggctaggctcctggtctcaccctggggcagccaggagccggaaacctcagcgcctcctggcacggaggctgcagtttacataccccactgggactgcctctggcttcgaccctcagggtctttcgagtggagtttgaatggtttattggtttcttcgggtacccgccagctttccttaacacccttgacgcttgagctttctccccattcctcctggaagctactgtttcccaccacatctcattcatcccaggccagcttcagggctaagggtgggtggccctgaaaccctgccagcccatccctcgaggacacctggcttctgcagcctgttgaggagccttccttccccttcagggtcctacccctcatggaggtcaggccactgccagtctaccccacctcaaacaccagggtcagctgggctctgctgtttggtttttatttcgctggagaggcccggccaggcgatgagggccaggtcctgccaagcctcatttgtcgctttgacccaggtcctgcaacagcccctgtggctgctatcttccccttggaccggtcccccagggactcagggcaacgtgtggaggtgtgtttggtgtggaggtgtgtttggtgtggaggtgtggggggtgtggaggtgtgtggggtgtggaggtgtgtggggtgtggaggtgtgtggggtgtggaggtgtgtggggtgtggaggtgtgtggggtgtggaggtgtgtggggtgtggaggtgtgtggggtgtggaggtgtgtggggtgtggaggtgtgtggggtgtggaggtgtgtggggtgtggaggtgtgtttggtgtggagctgtggggtgtggaggtgtggggggtgtggaggtgtgtggggtgtggaggtgtgtggggtgtggaggtgtgtggggtgtggaggtgtgtggggtgtggaggtgtgtggggtgtggaggtgtgtggggtgtggaggtgtgtggggtgtggaggtgtgtggggtgtggaggtgtgtggggtgtggaggtgtgtggggtgtggaggtgtgtttggttgtcgtgagctgtgggtatttagcaccacacagagcccaggatggccccagtgtccacagggccaaggaggagaaaccctgcctgggatgatcagcagatgtttcggaggcccccacaggcccagccctgtgttgacatccagagggtagtgtggcagcaagaaccgcccctggcttcagagccaggcctgggttcgaatcttggcgctgccacctctgagccgacagttcctcatttgtgacagagctcacacaccagcctagcaggggtgttttaaggatcagagttaaatatataatcacatgaccggcttggttcccggcaggtgattagtactaagtaaactgtggctaccgttggcgagaccgaagggaaaacatatctgtggctgacatgggttgagcgcccgcccagccagtgctttatgtcattatcctcccgacgtagagactgagggtcagagaggcatttggtgtttgccggtaaggcactggcagaggctgtttacaagtaaagcacaattgtcagttcctgccctggggatgctttcaggctgaagacagggaaagagaacctaaaatagaagggggggcctagtcagaggcgcttttgctgcgttggcgatgctggggaaagtttgatgaggaggagggagggggcagggctttgctgggagggggcaccgtaggggcagggcactccaccagccccagccaaggctggcgcttcctggcgagtgggtgtctttcacggcccccacatcggggcctggcctccatggagtcccctgcctcgcagctgtgtcctctgagtgtgtgtgtgcttgctcctcctcagaacatggtgatgagttttcgagtctccgaccttcagatgctcctgggtttcgtgggccggagtaagagtggactgaagcacgagctcgtcaccagggccctccagctggtgcagtttgactgtagccctgagctgttcaagaagatcaaggagctgtacgagacccgctacgccaagaagaactcggagcctgccccacagccgcaccggcccctggaccccctgaccatgcactccacctacgaccgggccggcgctgtgcccaggactccgctggcaggccccaatattgactaccccgtgctctacggaaagtacttaaacggactgggacggttgcccgccaagaccctcaagccagaagtccgcctggtgaagctgccgttctttaatatgctggatgagctgctgaagcccaccgaattaggtgagtggtcaccctggggaggctgcgactggaggcttcacctaggccccgtcgcccagcccagcccagccacacagccgacttcgagtgatgttctctgtggcgcagccagggcggggagccacagtggccaggggtgtccttcctcggaagcaaagggaccatctttgatattggtcaccccttgctgtgttacaagttaccccgaaatggagccactggaagcagggggcgtctgttagctctcaggaacctgtgagctgtgttgcggggcattggggcttgggggctctcatgaggctcagtcaggctggagccacctcatctggaggctcgaccagggctggagcaggcacatccttgtgtggtggctggcaggcctcagctcctcgccagctcttggccacagtccccaggtcctcatggtgcggactcctgcacggattgcctgggcgtcctcagcctggtggctccctcaccctagggtagcgagtgtgcacctccaagctgggagctggagccctttttataacccaacctcggacacgcctcgccatctcccccacagagtccgttgctcacacagactctgtggcgcatgcagggaccacaccaggctgtgactgccagggccaggggtgaccagggccacctgggagcctggtttccctgcttattccccttggaaagggggctggccagtggcatccttcccccgggctctggttcctcgctggcagcctgcaggagtgtccttggtcagtgggctcaggtcactgccaggctgtgtgcaccgggcgtgctgggggttcagggcgatcccaggcggaggagaggtgctgggctccacgcttctctctctcgtgtctttgtctgcaagcactgactgagcaggaactgtgtgtcaggacctcatagcccacagcagtgtggacaggcccctggtgcctccccagcagccgtggccattcaggctgcaggtgggcattgagcccagtctctgcctcagccatagccctgagctcagggccagggaggcctccgcagccccagcccccagggcagagagagtgtgcagcctctgggactcccagatagggagcggaacgtcctgggcctttgcggacctgtgccttgaggcgctcagatttcaccaagtcctctgtgtgcctggaggtctctccgtctcttcttcctgcctcccctcccctgcccccactctttccttcgcacagtaaacatcggagcgcctgctgggtgggtgcgtgatgggcaccaggcgtgggcacgcagcagggaacaggaccaaggccacgaggttcagaaccctgtgcatgccccctcccaccctgctgacccagcaacctgcctggcccctgctgtggcctgagggcccttctctggcacgcttcagtccattgggtgccagctggcccccgctcccctgcccagggaggcagcgttgatgggggtagggggaaggggaactggctgcttttcccctcccatctgcagccctgggacttagtgaggttaggctggaggggctgtgcttccaggtgaggatggaggaagtggaggagggaggaaggtgctgtcggtggttcctgcggcagccgaggctcctccctccagcctgaggctccgccttccaagtgaggctccgcctccaccttttttctcttgcaggaggtgtctagcagcagcctcctggggagcaggttggcccagtggcacctgtcctgggggactcagggtcttggcctgagttccatcggactgactttcccagcctttgctctctcatgagggaagctgttccccctgccaggttcttgggcagagctggctgtctctgaaggttgggccttgggaaggacctgcatcacagggaggctgggctttcctgggagcggcagggcaggcttggtccagggcgggggacggggctgaccagcttccttcctgcacggggaccagtagctccgtcccacaatacatcgctgtgccctgagccaccagggaccccggtcacctgatctccgggagagcctgctcccctgtctacaccagtgtgcctgtgctggcggctcagaacaaagaggccatccccaccctgcctctctctcccactggctctctctccatctcaggccgccaggtgaacctcctttcctggattccgtgctcttgggggactccctgggggccacctcggtcctcagaagtttcctggagcatagcccctggccccgaagcagtggtccccatggttttaggacctgagatgccatctgtccgccctgaccctgggctgtgtccctccccagggtgcactctgtggtgctggccttgcccgggggccgcctccggaggacccagttccaccggcttctccctcactccctcctctggctgtgacccaccgtccagcgtgaggcccaccgctctggtctgtttccccggaatagccgccggccggctccaggatggagaccgcgccaggcggacaggagccataaatcacgcggtgcggaatgctgggctgggggagggggtgacagagccacagagcaggctgcaggggcctcaggctgtaggtgatcggctccagtgggaggtgccgtgtgtggggacggggctggcacccagaacagtgcggagaacggcccaaggtcgcacagcggcctgccttccctcctcccgagccgactggctcctgctcctgagcagaggctctggcctggacctctgcaggctgggaaccctgtcctgcctgtcggcaaggaagccggcgccacccctttccagcctgcgccacctggggagtccggctagggagcctgaccctcctgtcagggtacttgggaagagaggctgtcaggaaatgtggggcagaaggaaggatacatgctggccgggcacagagctgctcctccagggtcttggcccgcagcgggcaccccgaggaatctgcctgcccacccgcctgctgtgcagagtggagcccctgtcaccacgactccagatgcccccagaggcagatagccctggtaccagccaagagccgccggtctggcatgtgctgtgctgtgtgtaggcacctgtgcccttcagcctctgaagcccttgggccagcattgcccaggccacagcaaggtagcgtggtccctgctcaggtgcagcacagaagtgccaggtgataagtctcatggcacacggagggctttcaggggcagctgtcagtagcaggagccatttactctacatttgtgaggaggtagcagtcaggaaggcctcctggaggcagcagcgtttcagtccagacccgagggtgactctcaagaagccaggcagagaggagggggcaggggagcgtattccaggcagagggcagtgagggcagaggccgatggccagagagggctcattcatggggctgaatggagttcattgtggccagaacatggtgcgcccaggaggagggacgcagtagcctgggcgcgggcggcagaggctggaacccgagaatggtgggcccggggaaggctgggggctaccctgcttgccccgagggcttcagcgcccctgaggttctggtatgatttttggggtcagtgaggaaactgaagtgcaggaggcaagtggccgtctgccttccacagccaggcctgctgcccgcccaggcccaccatctgtccgtctgcacactgggggcctggatgggcacggagcgtcctgtgtcactgtcccacatgtggggtagtctgacccactcagcccgctggcacttcccatacctgtggttggggaacagggggactccgccagctctgccccaggtcttggccttcaggttgaagaggagggatgggcccactgctaccagatggggggctgccagcagccacccccatgtcccgctagtccttctcccatcccctgtggccccctgccctgcccagcccagctccccaacctgcccgctggctgcagcctcctgctctgcttcctgcccactggtccccctcccatggcagcctgtgaatgttttcactgatgggtagagtggtcggcatcacccctgtgcctagccaggggcacctgttccccgcccctccaggacagtgccccctgtgtccctcatacctgactgtgctgcctctactcttgatctgggggacctgggttggggaatcagtgctggtagctcttagctggacagggtgggtccgggagttagagaacttgtatgtgccggggaggggacagcctggggagggggccagcacatgggccagctggagggggaatggtcccatccgatcagctttttttttttttttttttgagatggagtctgactgtcgcccgtgctggagtgcagtggcgcgatcttggcttactacagcctcctggcttcaagcgattctcctgcctcagcctcccaagtaactgagattacaggcacgcaccaccacacccagctaattttatgtacttttagtagagacgaggtttcaccatcttgaccaggctagtcttgaactcctgacttcaggtgatccacctaccttggcctcccaaagtgctggggttacaggcgtgagccactgcgcccagtctcattttttgtatttttaatggagacggggtttcgtcatgttgaccaggcttgtcttgaattcctaacctcaagtgatccacctgcctcggcctcccaaagtgctgggattataggcgtgagccaccaggcccggccccagtcagccttttaaaaactccctgtgtttcatttctatttaaacttgtacaattatgcgcttgtcctagaaaactggagtcaacagcagagcagtccggccggcgccctgctgcccgagtgggccgcctcggtacaccgggccggtgcttgccgccttctccctttgcatgtgtgattgtaggaatgtgtggctgtgtcctggctgctattttataaccaccccccatactgtgagcatctgctcacagcgttaaatattcatcgtcagcagcatctcgtgaggctccctggcagccttgggtggagccaacggctgggcccttcttgttgggctctcggatcgggcccaggggctgcttttcgtgcccgggccggagggcctggctgagcacctcaccccagaaccggctctgcctggcagggcccccgtggtcacctgatcttgcacctggccccaaaggtgcatctggttcagtggtgcccttgccttggtcccgtggccttggatgctgggcagcccacgaaaccatctcccccttggggaacttcatgcttcagtggcccaacaagaaggagcagcagagtgatgtagggaaactgagtcgctccttaggaggagaaggtttggagaaaagtgaggtggcggggggtgcggtttttaaatggggtgctcagcgaaggctttccttctggtgacatttgtacaaagacaaatatagggccatgaggctggtcgggggaggaaggttccagaagagggaatggcaggtgcggaggccctgatgcagcatggctggtggggcccaagcaggaggccagggtggtggccgtgtgtgcgccggggtgtgtgtggccctgagcaggggtactgagggtcaggggtctcctgcggagccatcccagggggcgggctctggctgctgagaccggcagagctgggggcagtcgtctgcaccgggcgggatttgaaaacagagctgacaggactggctgagggagtggatgtttgcaggacagcagagacgggggcttcatggatgccacctgggtttctggccccaaacagctgaccccgagggcagaagggcaggtttgagggagaccccacagccccttccccagcataggggggccgggtgtttggggggaaccgtcagcggcccggggccagtggcacagcagtgagagcacagggcacctcccaggcccccagcagagaagcacagcccggtctcccccagagggaggagccctcccagggcagggaccccagagtcttgttcttcaatgactgggccctgtctgccccaggcatgggctggcaacaatccctggccagctgggtggctcccttgctgcctgctggggacccacccttctcccctacctccttctgagacactgaggggtggggtgtctgtgttttcacctccgacccagcctggaagctcaaggcccagctcaggtgtaggctcccgtgcagcctccctgcccctgaaccattgctcccctggcactcagggcagacctgggcgcgtctgcaggtggcctgtgtgcccccctcccaattaggcggccttcctcaagggcccagccgggactccacagcccatcacctctgcagagactggctgtgccctgagcatataaacgggaaccggctgtggcagccccctcttcctgagggccagccacagacccggcaccggtccccgaagaaacaggtcaacatgggcgggacgtgcaggctgaggccacagaggccctggcagggctgggagccgagcccagggagtctggcttttttcttttttttttttttgaaatggagtctcgctgtcgcccgggctggagtgcagcggcaggatctcagctcactgcaagctccgcctcccaggttcacgccattctcctgcctcagcctcccgagtagctgggaccacaggcgcctgccaccacgcccggctaattttttgtatttttagtagagacggggtttcaccatgttagccaggatggtctctatctcctgacctcatgatccgactgcctcggcctcccaaagtgctgggattacaggcgtgagccactgcacccggcttctcgtgggttttaattgagaaagttccaagacagtgctggtagttgaggtgcgatcccatggctccggttcttgtaaaggccctgtcgtgggtgcaggccacaccactgtgtgcactgccgtcctgggagcacctgggagcacagacatagcctgcgaagctgatgagctccagcctttaccaggggcagttcgccatccctgttctaaagggcttgcctgtcatctcgttgtctcgtctcccggccactgcaaggctgccattgtggccagattctcgctcccccacgctcttccgatattttttacacttataaacaaataggtgtttactcagatgccttctctccattttcattacacaagtgatagcaggacgtgcacgctgctcagcgtttttgctttgtatctaaatatattttttaatgtagacacagtcttgctatgttgcccaggctggtctcgaacttctgagcccaagcagtcctctcacctcagcctcctgagtagcgggaatgacagctgcacaccagcacacctggctcaggcttatttaaaaactttttttagagacaaggtctcactgtgttgcctgggctgggctccaactcctgtgctacagcgatcctcccaccttggcctcctgaagggttggggttacaggcatgagccgctgtgcccagcctgcaagtttctttgaacgcatgtttccatgtattgagggaaaatactttggagtgggattcctgattcctgggtgatagggtaggtctgtgcttacctttataagggtagtttcccagagtgatggtactgtcttataaccccaccagcagagagttctgattgctctacacctttgccatctcttagagttgccagtcctttcattttagccatgctagtgggtgtgtagagaggtattttattttattttacctcattttatattattgatacagagcctcactctgtcacccaggctggagtgcagttacacaatctcggctcactgcaacctccgccttctgggtttaagcgattctcctcagcctcccgagtagctgggattagaggcgtgtgtcaccatgcctggctaatttttgtatttttagtagagatggggttaccatattgtccaggctggtcttgaactcctgacctcaagtgatccacctgcctcgcctccacagtgctgggattccaggcatgagccaccgcacctggcctgggtgtgtagagaggatttaaaccggtcttggatttctacacaaatcgcaggggcctgaaatactggctgatattttgtggaggattttacatctgtgttcatgaggggtattcatcgggaattttccttccttgatgctgagttgtgaggttttggtatcagagttatgctggccttgtaaaataagaagtatgctttccttctctgttttttgaaagagtttatgtacggtttatgtggtttctttccaaaatgttttatagaattcaccgatatggacctgcattttctttttctttttttttttttttttttttgagatggggtctgattctgttgcccaggctggagtgcagtggtacgatcatggctcactgcagcctccacttcctgggttcaagcaatcctcctgcctcagcctccaaagtagctgggactacaggtggtgtgcacctccacacctggctaatttaaaaattttttgtagagacaaggtctcactttgttgcccaggctggcctcaaactcctgggctcaagcaatccacccacctcagcccccaaagtgctgggattacaggcatgagccaccatgcccaatctggacctgcagttttcagaaaaggttttaattatggatccaacttccttaacaggtaaagagcttttcaaacttcctgtatcttttggtacccgttttggtaatttgcatctttgggaggatttgtccatgtcactaagttgtcagattcattggcataaagtttcaccttttattcccctattgaaccgaaaagctgtagggtctgtactattgttctttcatttctgatattggtagtttgtgttctcactgtctttttgttgttcagctagagttttgttttttttgttgttgttgttgtttttggtggttttttttgagacagagtctcgctctgtagcccaggctggagtgcagtggcacgatcttggctcactgcaagcttcgcctccctgcaagctccgcctcccaggttcgcgccattctcctgcctcagcctccctagtagctgggactgcaggcgcctgccactacacccagctaattttttgtatttttagtagagatggggtttcaccgtgttagccaggatggtctcgatctcctgacctcgtgatccacccccctcggcctcccaaaatgctgggattacaggcgtgagccaccgcgcctggccgtttgtttttgtttttgtttttttgggtttttttggaaacagtctcactctgtcgcccaggcagtggtgtgatctccactcactgcaacctttgcctctcagcttcagacaattctcctgcctcagcctcccaagtagctgggattacaggcgcccgaaccaggcctggctattttttttttttttgagacaccacaccctgctgtttttttaagagatgcggcagccaggcgccgtagctcatgcctgtaattccagcacattgggaggccgaggtgggcagatcacctgaggtcgggagttcgagagcagcctggccaacatggagaaaccctacctctactaaaaatagaaaattagccgggcgtggtggctcatgcctgtaatcccagctgttttgggaggctgaggcaggaggatcacttgaacccaggaggtggaggttgcagtgagctgagattgtgctattgcagtccagcctgggcaacaagagtgaaacaaagtctcaaaaaaaaaaaaaaaaatggggctggctgggcacagtggctcacgcctgtaatcccagcattttgagagtttgagatgggcggatcacctgaggtcacgagttcgaaaccagcctggccaacatggcgaaatcccatctctactaaaaatacaaaaattagccaggcttggtggctattcgggaggttgaggcaggagaatcgcttaaacccgggagacggaggttgcagtcagccgagatcgtgccattgcactccagcctgggcgacagggtaaaactccatctccaaaacaaaacaaaacaaaacaaaacaaacaaaaaccaatgttttctgactgcgcctctgcctgtcagtccagttgtaagtaagagggtagggcccaggcttgtgagcaccatggccttcatcccgtcagtaccccccgcaccacctctgtccgggtgacgtggccaccctgcaggcaggaggagagcaagggccgggtccggtttgtgctcaggagagaggaggtatggcagtgtcctgctggcctggctgggtccagctctccccgccaggcagctcggcacttttcggtttcctaagtagacgcctgcatcccacaggctgcgaaggtcacccagcaatctgagtggccgtcaacaggacacaggccatggtgagcggccccgagaaggggatgggcgggagtcctccctcatcctccttcctgggcggcccccacctctgccccacatatctgtccagccaacttcccatttcctgtttcctggtctgaagaggcgcaggctgggaaaagcgactgggctcgggggacctgccagggaccagacatgcccctgaccccgtgtttgtcttcagtcccacagaacaacgagaagcttcaggagagcccgtgcatcttcgcattgacgccaagacaggtggagttgatccggaactccaggtgtgcggcacctcccccagcccagcaccccaccgcccgcccacccactttctcctgggctcactggggagagccggcagccacgtccactgcaggcctcgctcgggctcagtccagaaccgtgctgcaaggcagtggccgggtttgcttccttccagaaaaccccatcctgggtctcaggtgctggcctgtgtgcccactgcctgtgccctgcagcctgctagagagaggcggactgactgtgcccttttaacacggtcttgccctcctgggcccatcctgggcattgcagggagcggaggagcattcctcgcctccacccacgccatgacaagaacacacccctgttgtgacaaccacagatgtccccagacattgtccagtgtcccctagggcaggataacccgggcgagacctccctgggttaggggattccacgtatccccaagagactctgtgtcccatgatcctctgccctgctgaggtcccagaaggctgcatacattgaaatccacaccctgaattggagggggagaaagtaggtgaatcccaggagctgggggtccccggtttacaccgcccgccttaggaatttattctggtgtccagcatgagcaggaagttaagtcaggtgtttttttgttttttttttttgagactgagtgtagctcttgttatccaggcttccaggctggagtgcagtggcgcgattttggcttcctgcaacctccacctgctggattcaagcaattctcctgcctcagcctcccaagtagctgggattacaggcgctcactaccacgcccggctaatcttgtatttttagtagagatagggttttgccatgttgatcaggctggtctcgaattcctgactcaggtgattcacccacctcagcctcccagaatgctgggattacaggcgtgagccactgcgcctggcggaagtcaggttttttcccagttatataatgaatacggggtttccccctccataccgtggatagtgaggtgggatggttccctcggtggggccgtcctgggcactgcaggctgctgagcagcatccctggcctccacctgctctgtgccaggaacacccctaactctgacaaccacagatgtccccagacacagctcggtgtcgcctggggcagggtcgtcctcagatgaggacggttgaactgtggcaggtgaggggccagtgtggctgccctgcgctctgctcctccctcagtctctccgaggctgtactgcctccagctgagacagattcctgctgggcaggctaatggtaggtgctgggcccttaggacaggggaggccatttgcccaggtcacccctgagtccatggcagggctgggccgggcgcccccatttaatgcctagcttctcgtgcccagccgcttcagacccaccgcccccacctgctgtggggccaggttcctggggcctcccagcctggccctcacacctagtaagggttcagatccagccgagccaggcttggccatggaggcctctctgcctgggtgacccaaggtggcgacctcgtctttctcagcctcgtcttccttgtctatgtacctgggtcagcacagcctccacctgcactgggtccctgctgcagagtgctcagagccagccacacagtataaaaaaatcagtttgggctgggcacggtggctcacaactgtaatcgcagccctttgggaggccaaggcaggtggatcacgaggtcagaagatcgagaccatcttggctaacacagtgaaaccccgtctctaccaaacatacaaaaaaattagccgggtgtggtgacgggcgcctgtagtcccagctactcgggaggctgaggcaggagaatggcgtgaacccgggaggcggagcttgcagtgagccgagatcctgccactgcactccagcctgggcaacaaagggagactccgtctcaaaaaaaaaaaaaaaaaaaagtttggttttctcctcagaaagcttctggacatttctttttctttttcttttttttttttgaaatgaagtcgctctgtcgccaggctggagtgcagtggcgtgatgtcggctcactgcaacttctgcctcccaggttcaagcgattctcctgactcagcctcccgagtagctgggactacaggtgcgcaccaccacgcctggctaatttttgtatttttagtagagacagggtttcaccatgttggccaagatgatctcaatctcttgacctcgtgatccaccccacatctgcctcccaaagtgctgggattacaggcgtgagccaccctgcccatcccacatttctttttcttatgtcgagatatgatttgcataccatagaatatacagtttttaagggtgtcatcgagtgggttctcgtggatcagtaggtatcgcagctcccaccactgcctagtctcagggcagtcatgtccatccccagcagctgccacccttcatccactggcccccacgcatcccctcctgtctgtaaatgggtctgtcctggacatttcatagaagtggaatcacatactatgtggctttcgtttattattattatttaagacagaatctcactctgtcgcccaggctggagtgcagtgtcgcgatctcagttcactgcaatctccgcctcccaggttcaagtgattctcttgccccagacttctgactagctaggattacaggcgtgcaccaccacactcagctaatatttgtattttttttgagacagagtcacactccgaggcccaggctggagtgcagtggcacgatcttggctcactgcaagctctgcctcctgggttcacgccattctcctgcctcagcctcccaagtagctgggactacaggcacccgccaccacgcctggctgatttttttttttgtatttttagtagagacggggtttcaccatgatagccaggagggtctcgatctcctgaccttgttatccgcccgcctcggcctcccaaagtgctgggattacaggcgtgagccactgcacctggcctaatttttgtatttttagtagagacgaggtttcaccatattgcccaggcttgtctcgaactcctgacctcaagtgacccacccacctccgcctcccaaagtgccagggttactggcgtgagccacctgccttgtgtgtcctttcgtgtctggcgtctctcactgggtgggacatcctcacggtgcacctgtgctgaggcctgggtctgagcctggctcctttccatggctgggtcgcgtcccgtgcgtgttggtccttcggtctacggaaggacactcaggatgctgctagtttgtggctgttgtggtcagttctgctgtgaacatccacggatgcgtctttgggtagatagactttttcctcttcttctgggggcgtttcttgttaaagtttatcctcaggtgttactggtttttgtttttttttttttggagagtgtttctctttgttacccaggctggagtgcagtggtgcaatcatagcttgcagcctgtgcctccatgggttcagacgatccccctgcctcagcctccaagcagctgggaccacaggtgtgcaccaccacgcctgggtaattttttgtggagacagtttcaccatgttgcgcaggctcgtctcaaattcctgggctcaagagctccgccagccttgacctcccaaactgggtgttttcttgccattgtgagccagctgctagattcccgcatgcacgttttagctatgtttcttcgcagggagaggcacctggctgccctctctggttcagggttttgctgtggattctgttgcattttccagggaggccagcccctctcctgacctcacagccactcctctcacccagcccgtacaaaagagtcctgggcctcagtttcccagctctgggggagggagccttgtggtgtggcggtctccaccttgtcgggtgggctggggtcacgccctcctcactcagctctcctttcctttcctctggtttgctccacacccacagggaactgcagcccggagttaaagccgtgcaggtcgtcctgaggtatgcccaggtgtgcccgcgaccccagggctggacccccagccacccgcccctccccgccccccagtcctggcccaggcccttctcagtctcccctgctaacagcagagcccagctctcctcacctgctgtctatccctgtctggggatacatcaccatccgacccccactcaggccacacccgggggccctgataccccccgtgtcacattctccggtgcccccatcactgccgcctggctaccactcgtgtacccccgcagcagcctagtccctcctgtgcgccccctccccgccccatggtccctgttgtcgttgcagaatctgttactcagacaccagctgccctcaggaggaccagtacccgcccaacatcgctgtgaaggtcaaccacagctactgctccgtcccggtgagcatgccccgcccccgcgtcggctgcacgggtttggggggcgtggagggagggtgggggccgtcggatttcccagccgctcttggctcgaggctgagcggcccatctgcttgcagggctactacccctccaataagcccggggtggagcccaagaggccgtgccgccccatcaacctcacccacctcatgtacctgtcctcggccaccaaccgcatcactgtcacctgggggaactacggcaaggtgagtgcgtgcccgggtgcccaccctgccccccaaccccggccccgtcctgccagccctgaccccttccttctgtccccagagctactcggtggccctgtacctggtgcggcagctgacctcatcggagctgctgcagaggctgaagaccattggggtaaagcacccggagctgtgcaaggcactgggtgagcagctcaggccacctcggccgaggggtgccaagtccaccctggaaacccgccctgtgctgggtgaagcggggggccctgcacccggaggagatcgatcaggggccgcctgtcactctgggggtccatggccccccggctgtggctggggaggtctctggaggatacggatggcagagggggcacttggcagtgggagctgctgtgcggaggcctgtggggtcacacctcgtgttgctggccccaggtgctccagcccacaggggtctaagcagcagaagagctggagcctcattccgggacagcacagaggccgggaggggtgagaggagcacagagggagctgtggtctaagcagccccttctcgttgcctcagcggggccgagggtgctgcgggacctggcgggtcacggacggccagggtcgtggaggcagttgctgtgggaggaagacgggcggcggcggtctgacctcacgttggtgaggccccgtttaatcttttttctttttctttttcttttttttttagagagtcagggtctctgggaggtagaggttgcagtgagctgagactgcatcgctgcactccagcctgggctgcagagcgagactccacctcaaaaaaaaaagtgtctcggtgtatcgcccaggctacagtgcagtggtgggatcgtggctcactgtagcctctaactcgggctcaagccatcctcctgcctcagcctcctgagtagcttgggaccacatgtgttcaccaccacacccaactaatttttttttttttttttttttttttttttgagacagagtctcactctgttgcccaggctggagtgcaatggcacgatctcggctcactgaaacctctacctcctgggttcaagcgattcttctgcctcagcctcctgagtagctgggactacaggcatgtgccaccatgcccggctaattttttgtattttcagtagagacggggtttcaccttgttagccaggatggtcttaagctcctgacctcgtgatccgcttgcctcggcctcccaaagtgctgggattacaggcgtgagccaccacgcccggccccaactaattttttaatgtttcgtagagatggaatcttgctgtgttgcccaggctggtcgtaaactcctgagctcaagcagtgcacctgcctcaatctcccaaagtgctgggattacagtcttggccactttcgcacctggtctcttttgtccttgtaacaatgaaaacaattttttttaagtgacacgcagagcaattttaaaagaaagcctgccggcaaggcgcagtggctcacacctgtaatcccagcactttgggaggccgaggcgggcagatcatggggtcaggagagcaacaccatcctggctaatatggtgaaaccccatctctactaaaaatacaaaaaattagccaggcgtggtggcaggcacctgtagtcccagctactcgggaggctgaggcaggagaatggcgtgaacccaggaggcagagcttgcagtgagcggagatcgtgccactgcactccagcctgggtgagagtgtgagactccatctcaaaaaaaaaaaaaagcctgccaagcctggtaggcaaatcagtcctcaccccaagcagccacgcagcacaaagccagcgtacagcagttagccctgcctggcggctgtgtggcctcagaaagtcgctggccttctctggtggccactgtcttcaggagaatagatctgagccatcttgagggcacctggacatctctctggaccccacatgcttggggcccaggcctcagtgggctctgcaggcctgtcttatggagaggctaggcctaacctggagtcatttggagctgggagtgggagtcaggcaggtgggtgaggactgggaccacctgccaggctgacgagagggcggttctgggccagccgggtttgctcgcacccccttcccgaatggtggctgttttcaggtggaatctgggcaccaccccagccccttggcagaatgtgggccagagggtcttccagctgcccctcctagctgcccaggcccctgtgcccaggccagagagttccccatgagcactgccctcctggcacagccaggcccaggcctctggtccctgttcctgaccaccaaagggcacctccttgcctgggtgtccagaagcctggagcagtgctggcactgccaggggcctgcgagccccatcgtgttgaagcctcctgtgcactccagccccccaagtcaggaaagatagccggcagcaccccctctgcagagcaggacgtggagggtgaggggtccctccacggagtccggcatccttggccagcctcctccaggctcggggatggagggcctggctatgtacccgtgtgaccagtggggacactgaggcacagagtggcaaagttagggttctgtgtcctgggttaccccgccccacctccctcttccctcaaagggcccttttttcaaccgcccccgaccttccctgcctgtggggacatggccaacttgagggaggaggctggggccgggcaggcctcttctaggcccacggggtgggggccgggcttaactcctcagtgaccagagcccgcagtgctgggggctgtggggtcaggcttcctctccgaaggggtctcctgctgcttcccacagccggccccaggctcagcctctctgtcactggatttctttcttgctgcacctaggaagtcctcacctttgcctcacttgaacccttcctgctgcgcacgtctctccatacacaaaggagggagagtttgctttaaaatcagatgggcacctgcatcccctcctagctgcccctttgccaggcttgagggtccacccgggcaccgggtagccagagctgggatccaaggatggaaactcagctgaggagtgagcggctggggcagccttggctcaagcaggggagctgctgggagccagcacgtggctgccaccacgtccccacgggagaaggaagagcccactgctccacaccccggctgggggtctgggtgggggtcaggaaggaggaagtggctcccaagcgggcagagataagtggtgtttcaggccaataaggggtggtaggggcatttccaggcggaggaacgtcaggacagctggggggagtgggggggcaggctggcaccatcactctggaccccaagtcacttgggcaggtggcttcctggaggaagcaacactggtccaccaggcagctgagggccaggtggtggatggagaggccctgtgggttgtgggccagggtggcctgccccccatggcccagggctggggtctctcctgagctacccatggatggagtttaccctgggatggagccacatcccagaagcctcaggagggcagccagggtccctgcgtgagtttccttctggctgtgggcctgctgcccgtcgaggggagggcggcgcctgcctccaagacttcatgtttcacatatgtttccccatgttccgtgcagcttgctggcgggcaccgtcttttcctttaaagaagcagctacactcctgtctgcaggctgccttggggcggtgctggggctgggcggcagccgcttgctggctcacagccaggaagccccaggatccgtctcccaaagagtccctgcctcattccccgctgtggccttggggatggtgcttcggtgacagaatgaagtcacagcaatgactctttcggtggctgtgttgcatgaaacttgccagaaaagtcccatgggtcatagtccacgcagggtgggggaggccacataggccacctccgtgtgggggcttcggctgggtctgtgctgtgcccaggttgtggtcaaatctaatggtggttgccacccggctttctccaatccctcacggccccgagccacacagcgaagcttgggactcatcgtcaggggcctgttctgggaggtggacgtcagtgccggagagaactcgaatcacagccccgcgccctgctgttcccaccctcctgacggtgtcttccgttccctccccacagtcaaggagaagctgcgccttgatcctgacagcgagatcgccaccaccggtgtgcgggtgtccctcatctgtccggtgagtcggggcgcggtcccctcctcgaggcctctcctgcggccggccttcccccctggcggccctgggcccggggcggcttggctgggccgtgagcctgcgggggcgaggctggtcttcgtcccctccgtgttcctgaggcatgagtgattggagcgagccacaggatggagctgggggtgaggggcaccgggcaggcgggcacaacaggaggggtgccctgctcacgcagcccctcccccacagctggtgaagatgcggctctccgtgccctgccgggcagagacctgtgcccacctgcagtgcttcgacgccgtcttctacctgcagatgaacgagaagaagcccacctggatgtgccccgtgtgcgacaagccagccccctacgaccagctcatcatcgacgggtgagcccggggccccggggagggcggccggagccggacatccgtggaggtctcggtggcaccccgcttcctgcagaccacatggtgccccagcaagacacagcagtgggggcacatggtcctggagctttggaaaccccgggctgcgaaaagagccggtttctttctcgcggaacttctcagagcctttgctatgcaggtgacagccacgtagcttaggttgcagaaggtgggctccggtccaccccgctcccacgtgacctcaggcaagtgtgaccctgagctccaggagtgtggtttgtgccacaaaaaactgagccaggtcgtgctttcacacggcgttcaccccaggacgcgcagccttgggggtgacctcctcacagaaaggcaaaggaggtggcgcctcctggagcactctggctacgccatgcccttcccttcctaggtggcacagctgtggccaggcattccccaggccacaggggacaggaggacaagacctttctccctggtggaaggctctgcccagggcttaagtttccagaaactgagccccgttgtctgtggtgcctgatgcggctcctgcccggcgccgaccgcgcccacctcgtccccagagccgccggcagggcgcgaggccacagcggcacaagctggcgccctcacaggcgggagcaggccctgcctgtgggggtgggccgggtccccagccctcaggcatggcctcagcggactgtgcaggtgaaggcagggctggcctgcctctggggttgtagatttcatccccaggtggacctccggttcatgcacttgtccccatcccaggagacagacctgtgagcgtcctcagtttacagacgaggaaacaggctcagaggaggcaaccagcagctggagctaccccggctcacggggccaggctgagacttgaacccagcctgagtctgggtcccctctgtggagggctgggtggccacccccttgcatcccagcttcgggtagagagaggagtcctttgggccgggcacgtgggctgcctgaatggctgctctgttcccagcctgacagctgtgcagccgggtgcccgccttcccccacaggcccggagtggggcttgggcttggggtggcggcagctctcacagctccagggccaccagggctggggcaggcagctgtgtcccatgcaggccttggcctcagcagcccatgggactcggtgtagccagggaggcttcctggaggaggggtccttggttcatactttgttccatgagccctatcacctctctgtccctggctctgagctgggtgaccccagggtccccaaaagagccccgtcccagaccctgccttcagagtcttgttcttggccaggggagcggatagaggagcagagccagacataaacgttcccgttgctgtgtgtgtcttggggaggaggaagagaagctgtggggtggggctttggagggtgaaaagcagttttgcaagcagggaagtgggcaggcagggctgtgctacgcctggggcggccctggcacggtgggctccgagcatcgcctcagagagagctcggcggggcggaggggctggcctgggtgagagcctcagaaagggtggcccagagtgggacgagggctctcctgtgtgatgagaacgatgccactgcgggtgcctgggagcagctgtagccttgacagtaacaggccagcctgggccctgcatggacccgtggggcagggggcctctcctcagacgccccccagccactgcacctttcccttcctgcgggtggggagactgaggccctttggctaagacgggttggggagcagaaccagggcctgcctccagttggccttgtggcctcagggaactcgttcccttcccgagcctctgtttctgcatttgtaaaatggggctggtaggacctccgagtaaaaaggccggacacagtgggggtgctctggagaggctgtggctggcatgggcgtggggagcccgcactctgctcccattgctaccctcacagcctctgcaggggctttgagcagccagcaccttcactccagcctgtttcctgatctggcgggcacacagtgcaatgtgaaagcaggtgtgcgtgcacacccacacccgcatgcccacacatccatacagtccacaccatcacacacacacacccacacacatccatacagtccataccatcacacacacccgcacacatccatacagtccacaccatcacacacacacccgcacacatccatacagtccacaccgtctcacacacacacccgcacacatccatacagtccacaccgtctcacacacacacctgcacacatccatacagtccacaccataacacacacatacagtccacaccgtcatacacacacacacacatctgtacagtccacaccttcacacatccatacagtccacaccgtcatacacacacacatctatacagtccacactgtcacacatccgtacagtccacaccgtcatacaaacacacacacatctatacagtccacaccgtcacacatccgtacagtccacaccgtcatacaaacacacacacatctatacagtccacaccgtcacacatccatacagtccacactgtcatacacacacacatctatacagtccacaccatcacatgcacacacatctatatggtctacaccgtcacacacacacacatctatacagtccacacctgttacatgcacacatctatacagtccacaccgtcacacatctatacagtccacaccgtcatacacacacacgtctatacagtccacactgtcacacatccgtacagtccacactgtcatacaaacacacacacatctatacggtccacaccgtcacacatccatacagtccacaccgtcatacaaacacacacacatctatacagtccacacctgttacatgcacacatctatacagtccacaccgtcacacatccatacagtccacaccgtcatacacacacacatctatacagtccacaccgtctcacatctatacagtccacactgtcatacacacacatctatacagtccacaccgtcacacatccatatagtccacaccatcatacacacacacatctctacagtccacaccatcacatgcacacacacatctatatggtctacaccgtcacacacacacacacatctatacagtccacaccgtcacatatctgtacagtccacaccgtcacacacacacgcccacacccgcatgccacacatccatacagtccacattcacgtatgcccatatgcatccattcacacgtgtgtacacatgctcacacacacacattcatagactccacacatgcacacgtgcacacacacgcacatgctcgcacacatgcacagatacactcacgtccacacacgctcaaacatgcgtgcacacccggaggtgcccagaggggcagggtggggaggacccctgcagctgccacactccctgctcttgtgggtagttgggggccactgggtatgtgtgtccatgccccgtccccccggcagtgccgtgcactgcagacctgcctggggctcagcacctgcaggggcctgagggcgggggagggaatgcggggtccctggacccctgcggtcggggtggtgaggctgctcttgcagagagaagtggggagtgcctggctgcatccgggagggatggagggctggggagttgggggggtggggcacctccagccccggcgtcagctgtccgcctcgccccaggctcctctcgaagatcctgagcgagtgtgaggacgccgacgagatcgagtacctggtggacggctcgtggtgcccgatccgcgccgaaaaggagcgcagctgcagcccgcagggcgccatcctcgtgctgggtgagtgcctcaccccaccagccgcgcagtccgcagccagggccgcctcagtttccccatttatcagtggttgcatcctaagtacctgcaccctgtccctgttgcccgtaggcccctcggacgccaatgggctcctgcccgcccccagcgtcaacgggagcggtgccctgggcagcacgggtggcggcggcccggtgggcagcatggagaatgggaagccgggcgccgatgtggtggacctcacgctggacagctcatcgtcctcggaggatgaggaggaggaggaagaggaggaggaagacgaggacgaagaggggccccggcccaagcgccgctgccccttccagaagggcctggtgccggcctgctgaccccggccgcacactcgactttcctggtgctcaccacgcagaggggcacgggccagcctcgggcgcagagggaggagtgacctttctttttctttttattgtcgttcgttttgtttttccacccttttgcctggctcctggcacctgtacctctggactctcctatcgggggattaaaaaaaaaagtaaaatgacaaaaaaagatacaaaaaagaaaaatgaaacaaaaaagtcaaactcttaaaaacaaggccggccacccacacagccgcctccccggctggagtccgagccgggaaggggtagtgggcgggagggaccaggacgccgccccgcgccctcccctccggatgccccgccgcccgccgccctctgcccacgaccattccagccagtgcgcggggacccgggcggcgggcggtggggcgcagcccctctctggcgaccactttgacgtttgtctcttcctttgctttttctctgcaaatgcatcctcgcccagagaccctcacgcgccgagcagcgagcgttttagccgagaagccatggagtgggttggggcggggaggggcagtagggtggggggatgggtgggcaggatgggggtacagtgggcggctggggagggtttagccacagatgtgttgtattttttgaaagtgcaataatttggtattttgaagacccggcgtgtggtcaggaacccccggggaaggcgggggcccagggtgcggcaccgtgtggcgtgggggggtctcagttttctagccagctacctcggtaattccaattcaggttaacttccctacggaacagcacagatgtccacagatgtccacagctgccgccgccgccgccgccaccataccccggtccttggggcatgggttgcggtcgcttcccaaggggcagcagggaccccggccaccccggctctcggtttgggttgattcctctcctttttgctcttggttttccgacgggtacgaggctggcccggcaccctgtcccccgggagcctcactcttccagcaggaccagaccaggggcctccttcctgtccccaggcgttcccggcccctcgcaggccccacccatgcccttggcctcagggtccaacaactgggggagctaccagggctctgccttcaggagcccacagctgggcaccccccttgccccgcaggagaccggggcgcaggcggggcaccggcctcacctggttctccaacaccgctgcctgcggtctgttttgcttttgtcctccccagcccagaattttcctttgtataaacagaactcctagtcaggaagcaatatcatttcaggtctaaagaaagggacgtgcatctggccgagggcagttcagtctcactgcagagcccgcagcccgctgcgcagctcggcccctcccgcccgcacgggcagctgaaggccgctgttttctaatatttgtattctaatttaattgtttttaaaaaatgcaaataaaaaaggtcgaggtgaagccatccaggcgtccgcttttctgtgccctgtgtctcttaagtgtgtaccctgtagtcggggggcggagttgggggaaggacagaaactcagcctcacccacatctctctttcttggttattgcctcagcttcagaattcaaaaggtgctgctcgtggtcaaatgaggcagatttttatttatttacttatttttaatagagacagggagtcttgctgtgttgcccaagctggtcttgaactctgggcctcaagtgatcctcctgcctcagcctcccaaagtgctaggattacaggcatgagccaccatgcccgacctgaatgaggccagttttactgtgtactgtactgcctgggcctggtgtccaccacgctgggagaatgggagaagggacttgggctgtacatggaattcaggtcccaggatcgtccatgtctctgggtggccaagacgatacacaaatgttttgcttttgtaaggtgaaaaaaaagggccgggtgcagtggctcacgcttgtaatcccagcactttgggaggccgaggcgggtggatcacctgaggtcaggagatcgagaccatcctggctaacacagtgaaaccccatctctactaaaaatacaaaaagctgggcgtggtggcgggcgcctgtagtcccagctactcgggaggctgaggcaggagaattgcttgaacccaggaggcggaggttgcagtgagctgagatcacgccactgcactccagcctgggcgacagagcgagactccgtctcaaaaaaatatatatacagacaaccaatgagcacatgaagagatgttagggatgtgagtcaaatgcacggtgagatacctgtcacccccaccaggacagctagcatcaaaaacagcagcgagggtcagggaagctgcagtccacatggctggggaagataacgtggtgcagccccttggaaacagttgaggctaaatgtggagttagcgtgggacctgcaatgccagccctagacgtgtccccaaggtaagtgaacacgtccgtccacacaaatgtgctcacggacgtgcacagcagccaaatgtggcaatgacccatgtccagccggggagtgaatcagtgcagtgtggccatccacactgcagaatgacagccatggaaaggagcgaggctctaacacaggcccccagcccagacgaactctgaggatgccatgcttagtgagagacatcagacaccaaaggccacgaggcgtgtgatcccatttctgtgaaatgtccagaacaggccaatccacagagacaggaaggggattcacgggtgctggagagtggagaaggggattgagagtgatcacaaatggatatggggcatcctttgggctggatagaatgttctggaattagtggtgacaggtgcataatttttttaagggaattttttgtttgtttgtttgagacagtctcgctctgtcgcccaggctggagtgcagtggcgtgatctcagctcactgcaagctctgcctcccgggttcacgccattctcctgcctcagcctcccaagtagctgggactacaggcgcccgccaccacgcccggctaattttttgtgtttttaggagagacgggggtttcaccgtgttagccaggatggtctcaatctcctgacctcctgatctgcccacctcggcctcccaaagtgttgggattacaggcatgagccaccgtgcccagcctttttttttttttttttcttttgacatggagtcttgccctgttgcccaggctggagtgcagtggcaccatctcggcttactgcaaccttcacctccccccaggtttaagtgattctcctgctacagcttcctgagtagctgggactataggcgtgcaccaccacgcccagctaatttttgtatttttactagtcaccatgttggccaggatggtctcaatctcttgacctcgtgatccacctgccttggcctcccaaaatgctgggagcattacaggcatgagctgccgcacctggctttgaagagcaattatatggtgtgtgaattacatttattttcatttctgagaaagggtctcactctgtcacccaggctggagtgcagtggtgcaatcatagctcacggcagcctcgacctcctgggctcaagcaatacttccacctcagcctccagagtagctgggaccacaggtgtgcaccatcacactcggctaatttttgtatttcttgcatagacgtggcttcaccttgtttttctggctggtcttgaactcctgggcttaagtgatcctcccttcttggcctcccaaagtgctgggatttcaggcatgagccaccgcgcctggccttgaagggaaattgtatggtatgtgaattatatttttgtatttttatttttgagacagggtctcactctatcgcccaggctggagtgcagtggtgtaatcatagctcactgcagcctcgacctcctgggctcaagcaatccttctgcctcagcctccagagtagctgagaccacaggcgtgcaccaccacacctggctaatttttgtattttttgcagagacgtggtttcaccttgtttttctggctggtctcgaactcctgggctcaagcaatcctccctcctcagcctcccaatgtgctgggattacaggcatgagccaccactcccggccctctctgaagcacagaggttaggaagcacctaaccctggcttgtggtcctgaggctgcggctccttcagcttccccatgtgggacctctgagcagaggcctcagtgtgccctgagggtccacggtgcagggggctcaggacacggctgtagaaccgctgacccccaaccctgctccagcgcgtgtcggggacttgggcacgaatcctggctgcagcaggttcatgggtggcctcgcacaggtatggtgctttagcatggggtccacacaaggacccggaggccctcagacttcgtggtgtggcctctgtggtgtttcctggcaagggctgggccaggctttgttgacttcctgtggctactaggaagagcccaatccacagaggaggagctggggttctgagtggacccagtgcccggctcagtgcagccattgctgcctcactgtgccatctgcttccatgagtgcctcatccatcccttggggctggccccatccccacctttgctggcctggacagattccttggacatgggccgagtctggttggaggacaggaggaaggaggaggccctccctcagagaccctacccagaggtaggggctgcagctagctgaggcttccggctccagatcctggctcatgtccctggggcctggcatggggcagcaccctggggtcctctagcagagtcaggtggcccccaggtgaggctaccccgcctggggcctcgggaaagcctggagccagtggtgcccagggcccagccctggattctgctgacaactcgcccggccggttctccctgctgcccctctggccttatcctgtgccagctgcctgcccgcgccaggggctatgggtcaccttccccgcaagaggggcctctggacctgggtactcctcggacactcacccccaccccggtgctctgggtcaccatccacacccagcctctctgccacgcgacagacggaccccagagagatgggcctggcttccaaggccgggcaggaagagcaggaagggtcggggacctggggcttctctccttgggacccaggatccggtcaccctgggcccaaaggtgtggtgtggacgaggtgctcaacccacccagtctcttcagggccaaaaggggaaaagggggaccccccccaagccccccatccccgctccccagcctcccccgaacaaaacacagagaacatcaaatgaggcgactgaggcggcagcggtcgtaacaggctgcgtttagtggttctttttttttttttatgtacaagaaaaatgaatttttttgttttttcatcttttgtgtttttgtttgttttttattacttttaaagcttctccctccccactcccaaaaagtgcatttttatcagttttttttttttttaaatctcccacactttataaagactctcaatacagtctctggaatgtctatctgtctgtgctctgtaccctgagggcgccgccccgccccccattcaccaggcctggcccctccaaagtccaaggcacctcgattctgggcctggggtggggtggggggcgggacctgggcatcggatcctggtccacagcctccaggcagccccggcgagggatgggggtctccctggccccctccaccccctgggcccggccccccccccccccccccgtaaatctatgtatttaatgcgagctagtcttaactctgaggttgtagctcctggggcacccccagcctccaggcccctgacccgtcctgcgccagccacccaccacccccccccccccacctccaggaaggctgcttcaacttaaataactttttaaaataaaactgcaaatataaatatctttctttctcaaaaaataggatttttgctttttttgttggtttttaatatttttttttcttctgtttttcctttcattctctctgtcttgcctccaaccattctggttgccgggcgggagggggcaccccgaggcccctgcctcagtgtcaccacctgtgaggtgaccgctcctgccacggccccggggtctgaatcgtgcaaagacccctgtcccccaccttccctgcagccgcccacttccaggggaagaccctggaagaggctgggggacccccctcggaaggaagcaaaaagacagtgacaggactgcatggccacaatggtgggggggcagactttggtatcgcccgctcgagcctgcctggctgcaggtccacacccatgccaggccgggcctgctccggcattttacattcactggtttataatttttttttttcatttttaaaaacttttttgactttttttttttttccttaatctcaaaaggcggggggcgtcggggggcagaggcaggtagcagcaacagctagtagcaaagatgcttctctctctctcctgggcccggcaggctggggggcactgcagacgggggctccggcccggccacctccccggcccccgggcgcccccgcctgaagccccccaaccccagcctggacctcactcccgctctcttgcacacacgcacacacgcgtccacgcaacttcaccatgagaatggaaataacaatttcgcattgtttttcttttttttttttctctttttttttttgtaccaggcagttaaaaaaaaaacaccccaaaaaaagaaaacacaaaaaaccccaaacaaccaaacaaaaaagctttgagctgtgtcctttcatatggagtcaacacgaccctcctcaaatatcatttttttttgtttgtttgtttcctgaaacgcgagaattcagcaggtatctttggcaacactttatcacgaccttaatttaaagaataaaaataaaatcgattcacgtctatatacagtatgtgattgcgcggagtctggggagggcggggctgggctgggggggtcccggctctgggcccatgcagaggctgtggcccccaggacgggcgggtagttaaggcaaagtgggcgggcaggacaggcgaagctgagtgcggagctaggaacgagggtttagtgcaatccccgaggtctgtgtaagtgtcgcggtgggccgcagcccttgttcctacggaagtcccagagggctccaccccccaagtccggtcgcccccactggctaggacgacagctgtgattttagagttggttttattgcgagggggtgcatggataggggaaggtggaaagagggctcacccctcagggggcctctctgggagctggggaggggtgtccctggcctgggtgttcaagctccccgctcagccacgacagatggttttctctccagaacagctcgccctgtgacactggggtgtgaacgcagccggggtgctgtcacccagccccaggggagaggggggatcctgagacatttggagggggctgacaggcttaagggggggtgggaagggaagggaaccaaaaccatcctgtagaaacaatatgaaaattgccttcttaaaaagcttccctttaacaatgaaagaaaaagagacgagaagatgtgtgtgtcacagagaagggggtatgggggggtcgggggcagggagacacccccccgccggttgggcattgacaagaagtctcagtgcagcagagcgtctattttcggggtcccatgctagcattgcatatgcaaacggggtgagggcgtcctggcatctggcgacatagtctccccaaccccggcccctgtccgtggcctgtggctcggtcaacaccgggccttgtgggagccagaggttggggggaggcaggtcccagtccccctggattacagtcagtgcctttgagtaaaaagaggggtgcctggggtggggagaggggcggtggttctaaggccctggaggtggggggcccctgtcacccacctcagcagggtaggcgcatccaaggtccagctccttggtggccatgcgggagggacaggcgtgttgggggattggggggtgccggatggggatcggggtgctccggctggaaggcccatccctgagctagggaggaggaaggagagaccccgtggacagaagcgggcgctaagacctcttcacgtcagaaccaaaaaaggggacagaaagggggagcggggggaacacagcacgaacaccccacagtcctgccttcgaggctgacgtctgggggtgaagcacaaacacctcggggcgtctcccaggtcccctgcgatggcttcctcctgaaccccccttctcgctttttggggaacagaagtggattctacgtttgtggtgggtttttttttttattattttgtacaaaaataaatcgacttttaggaatttcttctgctctcgctctctctctcgctctctctctcgctcgctttttttttttttttttgtcttttcaacttttcatagaagttggttgtaacttgtaaacatgtttttaaattaagaattaagataaagtgtagtacccgttccgttacaaagtgccaagacttctaatgtggttggttgcctttttttttttccttcctttcattttgtaaaaccttttttttttctagtttgttttattgcttttgtgacattggaatttgtggattttctctctctccccccatccctgccatcaccagaccctggggttcctctgatcgtgactctgtttatcccacactgttgcctgctcctctgaggaaaagtatattatttatatatatatatatatctatatataaattttgtttttaaggaggaaagagaaaaaaaaatctaaaaagtgctttaaaaatttgggagagggggctcgggggagaggacgaagacagaagttttgaatctccaaacgtgggggtctaggtggaccgggcgggggtgggggggcgccctgaggggtggtccctgggggtcccgccggttgtaagtgccgtgaaggaaggcggcaggagcacccccaggagccatcctggcgccccaccgggaaccccagtccgatctcctttctccaggcctagaaataaataggtttgtgtctcagtggccaggagacgtggggtgggcgacggggggaggccgcaggcagggttggaggcggggaggccactggggagatggagagggagacccctcccttagtaagtgccctgaggaaggagggtgcgggtcgggggacgggggcccattttaacgtccgctcagagcagacagaaatcatttaaggtcttgtctgaaagactcatagaaaccagcgaggggaggaaattaaaagcccaccccagtccccccccagcgcccccacgtctaccctccccccagcccagggcctcggatcgggccccaggccccatgccgggtgcccagggggctgtgcggggtctcggattccttgtgtcctacaaaaaaccccaaaccaagccccgaaacccagcgatggggtggtggggggaaggggagccagggagggccggggcccctgcggagggagaaaaacgtcagaaaggagggaaatctgagaaagcgctaccctagattctgtgacgcgtcatatatatatatctgtatatatatatatagatatagatatctgtatatagatagattttctttttttgtgtttttgggggggtggtgggtgattttttttctctctctctgtctctctctttctcgggtttctgttttctctttttggtttttaggcgagtccggctgtgaagttaccgtcggtggcggccccggggccacctccgctgtcacctcctccaccggcgcccgctacattcaaccggcccaagccgtcggggctggccacgtcctcgtcctcgtcctcgtccttaaagtgcttctcctggccgttgcgccgggcgtcgggggagctgggctgggcgggggcgccgggggtcgcggtggcccccgggctggggtcgggcgccccgccccggacgcggggcttgcggccgcggcgcgaggggacgccgttgcagccgtctttcttgaggtgtctgtgcaggtggtcggagcggacgaaggtcttgcagcagctgtcgcactggtaggggcgcaggcccgtgtgcacgcgcatgtggttcttcaggtcgtagttgtgggcaaaggcggcgccgcactgctggcacaggtacggcttctcgcccgtgtgcttccgcatgtgcaccttcagcttgtcctgcctgtggacggggcacggggcgggcacggtcagtggggccggggacccccgatccccgcccagggaccctcacggacacggcaggccctggatcatcacccttgcagaacacggaccgtgcaccagaggtttcggtgccccgatggggacggtccctcgaaaaacgagacgagtgggggcgatttcgcattctgaacatctaaagagggcctcggaccctgagtgctgtgtggccttgggaaaacgctatgcctctctgaaccccgtttcctttccttttttaactttttaagagacaaagtctaggccaggcgcggaggctcaggcctgaaatcccagcactttgggaggccgaggcgggcggatcacttgaggccaggagttcgagaccagcctgatcgacacggtgaaaccctgtctctactaaaaaaacaaaaaacaaaaaaacaaaaaacaaaaatcagccgggcatggtagcaggcgcccgtaatgccagctattaggaaggctgaggcaggaggatcacttgtatctgggaggtggaggttgcagtgaaactccgtctcaaaaaaaaaaatttcactttttaagagcgaaactccgtctcaaaaaacaaatctgccaggcgtggtggcgcaggcctataatcccagctacttgggaggtggaggttgcagtgagcccagatcacgccactgccctccaacctcggtgacagaatgagactgtctccaaaaaaaaaaaaaaagagaggcagggtctggctttgtcccccaggctggagggcagtggcgtgatcacggttccctgcagcctcgaactcctgggctcaagccatcgtcctgcctcatcctccagagtagcacacgcaccaccacaccctattaaatagctattaaactatatgtgtgtgtgtgtgtgtgtgtatatatatatatatatatatatatatatatatatatatatgtaagtttgagagatgggggttgagctacgttacccaggctaatctcaaactcctgggctcaagtgatcctcttgcctcggcctctcaaagctctaggattacaggtgtgagccactgcgcccgccatgaacccctttccctaccacagaaggagacagtgggcttctgccactccatcctgcccctacccctggggtaggatgaggccagccagtgcctggtgccttcattcatgccacagacctttgccgagcgcccgctgagggccaggccctgttccaggtgctgaaaataccgcaaggaacaagacaggcaaacatccctgccctctcgaggctggcggcggccgaggtgtttggtgacagatagggtgaccaactgttctggttttagcactgaaagtcctgcatcctgggaaacccctctgtccgggacaaagtggggcagttggtcaccctagtaaccaagtccccaccccacgacacccaggactgcccactctcccctcacttcagcgtcactcccctatctgggctccaccctgacgtgcaaaggtgcaaagcacaagctacgctggggcctttgcatgtgctgctcccgcagtccggggtactttcttttttcctcctggatcttcacagtcaaatttgggctcaaatgtcacctccttccccagccctgtctccatcctcctgtcatcaccacctgactcttctattgtttttttttctgagaccgagtctcgctctatcttccaggcttgagcgcagtggtgtggtctccgctcactgcaacttccgtctcccgggttcaagcaattcttctgcctcagcctcccaagtagctgggattacaggccctctgccaccacacctggctcatttttgtatttttagtagagacggggtttcaccatgttggccgggctggtctcggactcctgacctcaggtgatccacccgcctcggcctccccaaacgctgggattacaggcgtgcgccaccacacctggctgatttttgtatttttaatggagacagggttttcaccatgttggctgggctggtcttgaactcctgacctcaagtgatccgcctgcctcggcctcccaaagtgctgggattacaggcgtgagccaccgcgcccggccggtctctcttgtttctgttgatttccttgtttctcctctgtctccctgattggattgtgagccccgagaaggcaggggttgggtgtgacttgagggcccctccctgcctgtctcgccccatgggggcagcgtggacccagcttagcctggagcctctagcctacaaagccggtcaccatatcagtggggtgcctgtggcctaggtggctcctgaacccttggaatgtggccactctgaactgatgtgcgctggaagtgcaaaaggtaccccagcttttgaagacttgatatgcaaaaggtgatgtaaaatggctcaatgaggatcgtgcacattgactacacatggaaatgcatctactgggttaggtaaaatgtttcaagtcactttcaccaactctctttgactttttttgaacggggctgtcagaaaatgtaaaaatatgtaagtggcttgctggccgggcatggtggctcacacctgtaaccccagcgctttgggaggctaaggcgggcagatcacctgaggtcaggagttcgagaccagcctggccaacgtggtgaaaccccgtctctactaaaaatacaaaaattagccggcatggtggtgggcgcctataatcccagctacttgggaagctgaggcaggagaatcgcttgaacctgggaggtggaggttgcagtgagctgagatcgtgccactgcactccagcctgggcgacagagcaagactcgtctcaaaaaaaaaaaaaaaaaaaaaaaaaaaagtaggtgtcttgcctattcccattgagtgatgccaatctatagtaataaagtgtactccttcctgggatccggagggcaggagggagccctgggtctcaagagccctggctagaacctgacctactccttgctgctgcctgttgtgccccacatctgagccacctcgggtttcttccttctcacactcaatagactgaagacttctttagtgtggggactggcaaactcctactcatccctcaaagccctaccttgaatgcccctctacctttcctaattcccaaagacctggctcccctctgggttcctccagccctaagtccctccctctggcaccagctacagagctggtgtccctaactttaacccctccttggctctgttgccctgagggtcaaggcctggcccttggcaaccagacccctaccttatctctagccttgctgccccactgaagccaacagaacgtggtaacttgctaacagaaccctggcctaaccaggtctgttaccagcctccaggcctctggtttactgatcaccttctgcaaagcccacggcaaggtctccgggctgccttgcccagatctggcacagggccggggtcacagaggggatggcagccactaggtttttctagaaccgtgcagagactccccagatgagcctgggaggcccagagagaggaagggacttgcctggagctgcacagcaggccagagggccacgcagaggcggggtgggggcggaggtatccctagtttcatcaccccgagccccagcctgggtaattatagccccggccaccacaggccccacttactcaacgccctgctgtgactcagaggggcctcgggctcccaggcttttggagggtggaggtgctggtgtcctggggaggggggaccagagcacggggtgggggaaaagaggaagcaggtgggtctaaattggggtgggaggaagaggtctccacaattgtccctctctaagcctcagtttctctgactgaggggatcagccccgggtcgggtgggatagccagcagtgcccgagtcagaatgaaaccgggcctgtggcctgcggccagggaggcagggtgggggtcaccaccttcgctcagcctggtcccctctgcagaccccagttctctgcaccccaccaagctgctcttcctgagctcagagacgaacccacagtgacccctgcctggaggaagaggagccccccaagacctccagtaccccaacctcaccaaggagggacaaaccaccagctacactgcctgcctcccaaagtgccctttgccccctgcctggcactcctgggcgccggagtccaggccgcaccttcctctcctggcctgctggggagggggccggggtgctggggaggggtcagtcccagttcctgtccccacggggtggggttgggaagctgggacaatggcctctttcttcagcctcggtgggcgtggctgggggaaccccagggcgggcggggggcagggggtggtgctgagtcacccagcctggccaggtccctgcctgccagccccctgcccccaccgctacagcccgccccggatctacgaggcccagccagccacctctggactcctgagaccgaattgcaaactgcccgggcctggccttgaactcctgctgtttagggaccaagtcctgtggctcccaggggggcacagtgatctctcaagctgagctggcctcagggcctctgcactggctgttccctctgcctggaacgccctttcccacagctgctcctcccctccttcaggttccggcaaggcctgtccccggcgcctagaacaggcctggcaccagcagacgcttcataaatgttggctgattgaagcaaatgacccaggctcacgggaaactcagaagccgctccacggcctgggctgtccctccctaagcctgagggcctgtcaccctctcccaaagcagaaaaagaaaaaaatccaaaagtgcagaagagaagaaccagccctccaggaaggaagaacgactgtgccttcccgcccacctcccgcagctcaaccctgtccggcacgctttgcatatgatgtggctgtcatcttatgtctggcctgtgctgtcacccaccgggatgtccacccacaagggcagggcctggtctaggctgttcttaacagccacgtgggtcagggaagcgttcgttggctttgggcccaagaggtggggtgtgtctgtttgcgtgtgtgtgcatatatgtgtgtctgtgggtgcatgtttgcatgcatgtgcatgtatgtgtgcgcatgtacgtgtctgtgtgcatgtgcctgcatgcatgtctgggggtgcgtgtgcatctgtgtgcgtgcctgggtgtgcgtgtgtgcgtgcgtgcgtgcgtgcatgtgtatgtgatgtgtatgtggtgtgcgtgtgtgtgcgcgcatgtcggtgtgcgtgtgtgtgcgtgcatgtgtatgtgatgtgtatgtggtgtgcatctgtgtctgcatgtgtctgtgtagcatgtctgtatgtgtatgtggtgtgcgtgtgcgtgtgtgcgtctgtgtgtgtgcatgtgtacgtggcatacgcgtctgtgcatgtgtgtgcatgtgcgtatatatgtgcaagtgcgtgtatgtgtgtctgcgtgtgtgtggatgtgtaggtgacgtgcatgtgtctgtgcgtgtacgtgtctgtgtgcacgtgcgtgtatgtgtgcgtctgcgtgcatgtgtgcgtgcggtgcagggagagaggcgggaggggtcgtgagcggcggatgctggggcagagagcaggacggcgcctcccccgcggcgggcagctcacctggtgaagcggaccttgcagatgttgcactcgtagggcttctcgcccgtgtgggtgcggatgtgtcgcggcagcttgccggcgccctggatgaccttctcgcagatggggcacttctggaaggccttggctcggatcttcttctccaccttctgcgaccaggccgggtagacgtcgccgtcgtgggcgccgctgaagtacttcaggtagtagtccatgacgcccttgtcgtcggcccgcgactcctcgtcgctgtcccccgccgcggcccccgcccggcccaccgatgacatcatctgctgcagcagcgtgctggccgccagcccgtccacgtcgggcccgtccccgtcctcgccctcggccgctcccgacaggaagcccggagagtcgcccggctcgggggccgcctccgacagcgaggcggcctcctcctctccgccgcggccgtagtggccgttctgcgtggcggccggcggggccaccggcggcggaaagagacccccggtgggggcgtcctcatcccgctctggccacagacccgggttgctgtcgccctcgtccccgtcccccgtcgggggccgctcggccggggggcccggcccatagaagtctaagccgttgcagtcgcccgcggccacggcggccacagcggcggccacggcctccttggtggcatccaggtcatcatcggacgccccaaaggcggaccacgggaagctggcagcggcggcggcggccgcggggggcaggctgttcatggggttgctctggaagaactcgaggtactccttggcgcggaggaggttgcgctgatcaatttgatctacaaggtccagctgcccggcgtcggcgcccgcgtcggccgccaggatctgccggtccaggaggtcggcgcacacgtggctcacggcggggatctccagcaggcgggcggcgctgaggatgtcacccacgttggctgtgctgacggtgagcgtggccgtgtaggcgaagtccatgagcgcggtgagcgcctcggcgctgacgaagtcgatctcgtacacgttctgctggtccaccacggcgcccgacgtgaacagcttcttgaagtactggctgcaggcggccagcaccgagcggtgcgtggggaactcgcggccctccaccaggatcaccacgtcgcacagcaggccctgcgtccgctgctcgttcagcccactcaggatgtcgctgctgtggtcggggaacgggatcccgatggggccgtccacgccgccggccatcttccgcgccgagacctgcagcagtggggaaggagagggcgctcgtgagtgggggtgcgggggttcctgtgcccactgacaagggcccgaggcccttgagaagcagcgttccaccctgctcccccagcctcacattcccacctgcacgtgaaggcggtcagatgtcgcgcctttccagccccagcttccccagctgtgcaccaaagcgatacatgccctgcctccagcctcttttcttttttgtgtgtctttaatacagagacaggctatcaccatgttggccaggctggtctcaaacccctggcctcggcctggcgcggtggctcacgcctgtaatcccagcactttgggaggccgagacaggcagatcatgaggtcaggggatggagaccatcctggctaacacagtgaaaccccgtctctactaaaaaatacaaaaaattagccgggcgtgttggcgggggcctgtagttccagctactcgggaggctgaggcaggagaatggcatgaacccaggaggcagagcttgcagtgagctgagatcacgccactgcactccagcctgggcaacagagcaagactccatctcaaaaaaacaaaacaaatcaaaaaaccctggcctcaaatgatccaaccgcccctgcctcccaaggtgctaagattacaggcatgaaccacggcacccggccaagactgttttccatctgtgcatgaggatagccagatgtcccggctccccagcctcagtttccccagctgttcccaagtgcagtcaaatgtcctatcctctagcctcagtttccccagctgtgcatgagaatggtcagatgtcctgcctcccccagcctgtttccccagctgtacacaaaagcaatcagacgtcatgtccccagcctcagtttccccagctgtacaggaaggcaatcaggtgtcccactcccaacctgtttcccatctgtacacaagggcggccagctgtcctgcccccagcctcaatttccccagctgtgcatgaggacagtcaggtttcctgccccccatcagcctcagtttccctagctgtgcccaagagcagtcagatgccctgttctgtctcatcagcgtgagatgaggctggcaaaacccacactggacgcttaaatttcacaagcacactggcaccacccctccgaggagggcccccgggaatgcctgttgaaagggcactttgaggcccggctcggtgctcacgcctgtaattctagcattttggggaggctgaggtgggcagatcacttgaggtcaggagttcaagaccagcgaccagcctggccaacatggtgaaaccctgtctctactaaaaatacaaaaattaggctgggtgtggtggctcacacctgtaatcccagcactttgggaggccgaggcgggcagatcaccaggtcaggagatcgagaccatcctggctgacacagtgaaactctgtctctactaaaaatacaaaaatagatgggcgtgatggcacgtgcctgtaatcccagctactcgggaggctgaggcgggagaatcgcttgaacctggggggtggaggttgcagtgagccgagattgcaccactgcactcctgcctgggccacagagcgagactccgtcttaaaaaaaaaaatcagccaggcgtggtggcgcgtgcctgtaatcccagctactcaggacgctgaggcagaagaatcgcttgaacccgggaggcgaaggttgtggtgaacctggatggagccaccgtactccagcctgggcaacacagcgagactcggtctgaaaaaaaaaaaaaaagaaaaagaaaaagaaaaaaaaaaagggctgggcactgtggctcacatctataatcccagcactttgggaagccaaggcaggcggatcacctaaggtctggagttcaagaccagcctgaccaacatggtgaaatctcgtctctactaaaaatacaaaattagccaggtgtggtggcgcgtgcctgtaatcccagctactcgggaggctgaggcaggagaatcgcttgaacccgggaggcgggggttgcggtgagattgcgccattgtactccagcctgggcaacaagagcgaaactccgtgttggaaaaataaataaataaggaaagggcactctgaggcgctacaggaggacgcagtagctcgagagaagtgccctgatctgagccattttcctgttgatctgagcacgggcttcggccgatacagaggggaggccacgcagtgacctttacaaaacacctactatggccagacgcggtggctcacgccggtaatcccagcactttgagaggccaaggtgggtggatcatgaggtcaagagattgagaccatcctgggcaacatggtgaaaccccatttctaacaaaaaattagctgggcctggtggcgcgggcctatagtcccagctactcgggaggctgaggcaggagaatcacttgaaccaggaggtggaggctgcagtgagccacctagatcacgccacagcactccagtctggtgacagagcgagactcgtctccaaaaaaaaaaaaaaaaacaataacaacaacacataacacctacttcccgccagttccacccgaaccccaccggcagcacccactccgtcgtgagctgaggccacttgcccgaggccccaccatgaggacacagttgcgtccaaactcaaacccagagtggacctaagagccgaccccttggcctccccaaccctgactcctgcctcctggtcaggcctggttcttttcaggggggctctgagtcagcaggaaggggtgtggcagcccaggcacggggacccagtgccgaaacccagctgaggtcaaggccaccgtgggtgtgccccgtccggacagggccagtgactccgcaggctaaaccccttcctgcccctcagagcccccagcatagggctcagccctggctgtgagtaacagagaccgggctacagcccaggaggagcagggagccgggggaacccctgtccacctcctgcctgcccacaggactgcctggcagcccctccccaactctcagccaccccagctgagctgttcagccccagccaaggccttggccctctctgggcctcagtctccctatctgtcaaatgggcagaggtttcgggcagcgccgggccctggggggactgtgtctgtcccacccctttctccccctcccttttttccgccttcccctcggctgtgactcatccacccactcggagcttgtgcaaccctctggcccctgtccccacccctccgccctctcctgggagcccctggcggccccgagtcacccagcacagctcacattcctccaggccggccggtggctctcgggccagagcccctgggcaaggcccctggggagagggcctgagctgggcctttcatggcctcctccgggccaccagaccctcctgtcccccagcccagcagctcaggcaggctctgacgccgacgggcttgagccaggccccacaagggaggcatggtgtcggtccagccggacccaaagcccagggccctcagcgcggggcctgagctgccaggcgacacagaggcctttgtgagcttgctcagtgccaccacgctccccaggcccctccacccgccttccttccctccttccagcctcggcccagggcccagctgctcagcacccccgtctactctaaggcctgtggtggggcggtgggctcagatgtggctgctgggagcagggagggtaggaggggagcgaccccacccaaggctcggccctgggaagcctccgaggagtcccctttggtggtgtccaccccctgccaccatctgccgtctggccctgggccgcggggagcgtgtgagcagatggagctccggatcagacgggcccgggccctcctacccaccccagcatggggggagacctctgacccaggccaccaacgccccaagatggctatccctggcctgctgggccgttcctcccctcgggtgaccagggtccccgctctggagtggctgggaggtgtctttcctggggcctggaggatgggcccaaaataatccaggtggctcagcgacctcctgcaggtccccgccagtgtgaagatcccagttccaggttgggtccgggggtcccagtctctgccctctccagcctgggaccctctcttgggcccctgttcccccctaaatatcactgaggccctccctcaaagcagcgaggcccggggtgatgtcagccaaggaaagcccccgtgagaggactgtggccgcgttttacagatgagaatgccggggcccagagagggctgcagtcctggcctaaggatgcccggcagggctgactcccaggggctgggggccaggaaatgatggaggggccggtccccccacccacccagggcaaggccctgccctcgccctggaaactaaactcgctctgagacaactgacccacgccctcactccaggaacacaagccacctgccggccacgccctgcgccaatgcccccacctaggcctcctggaggcctcccctaaggaaagggccgaagaccctgcctccgaggtgggagaggggaggccgggcccagccagagcacccccggcgggggccacaaagtcttggcaataaaaagtccccgagtgctgaagccccactgtgcgcccgacacacggtacacgcctccggaggtggcggtttcgttcccctcctccaggaagccccggccccacgccagccaggtccccacccctgccggccagggtcccctgggctcggcccacacccacccggggccccatctttcatcacagctcctcccccgcgctggcctccgtgggatttccggggctgcttggtgctgactcggcggccgaggggcaggccctggcaggcccctcctgggctggaggtggggcgccctcctccccccgggccactcccaggcccctaagcccaaccctcccagggtggcgcatagtaggggcgcagcaaaccgccggataaaccagagacagcccacgccccggcccacccagctggctgccaggcatacccagaagcagggggctgtgcagcctgccggtcccacctcccatctaacctaagggtcacttgctgtagtgtttgtcgagagccacggcacccgggccgcatttcggccccctctgtgctcccaaactaactgggcaccttcacttcgtcttccccaggtccctgagaggctcagagaggtgaggcggcccagtcgaggtcacacagcagccctctgatctgggcagctgccacttcccagctgcgggggatgtgtcgtgagctcggaagcaccctgacgtggctcagggagcagcagatgtcgcctaggaaggaccccggcatcccaagaagggcaccccagcacggggagcatcaggaactgaggcctggaggtgggcgaccggggaagggggaccggcagagaggaggctgcatcgctagtgcagggtgtgggagccaggggcctccccaaggtcacacgacaaggtgagggctgggcaggtaactgccacccgccaccttcccgaaggtcacttcctggagcagggggccgtctaatgaggggatcagggcccccacccaaccctctgcccagggagagcagggaaggaggccaaagggacctctcacccctcatgtgctgtgcagagcagctcgggttcaagcctcggctcccccacctccaagctgtgtgaccttgggcaagatgcgagacctctctgagcctctgtctcctgggggatgggggtcgtaacagtggaaaggggccccccactgtggtcagggtcccgctcacatccattcagcaaacttagcccagggacctaatgtgcgccagagccagtccccaaaacacattgccaggctgttcaccacccctcacggatgggaactttgctcctgaatgctattccgggaattcagtcccctcctcacctaccaagggagtgagtggtggggcctgaggaggaagctggaaggggagatcaggcccagagagggtgggcggccggcccaaggtcacactgtaagcctggtgtgcaggtgcggctgccaggcccgcacccggcagcccccgccccctccccgcccagcggcctgtgttgcaaggttggtcccgacgggtaaccccgccctgacctggtgccaagccccgcctggcccagtcctcggcctgggtttaatgggacaggaatgcagtgtcccgatcggggggcaccaacggcctggggtggctgccagctgccagcccgccccctgcccgcctgccctcgcccgcaggcctccctctgggccagacatggagcaaacaggccctcggccattttacgtgtccatttattgccctaaatggggaggggcttcctgcctgggccttaaagggccagaggcaggaaggccgtggggacccagtgggaagtgtgacagcggggatgggggcagcgatgaggaggccagggggatcccatctgacgcccaactcatgggcgggactgaggcccaccctgttcccacactctgagatgtcatgggccaggaagcccagactacagcccgagcccaggttccaagaggaagcttcatgacgacagtggaggggctgagcttcccgtcactgggggcaagcaaggccagactctcggaagcccatccttgtccaccctgccatcagcccaggctgcacctgcttagctgagatgcctgtgagaggccgaggtgacctctctctccctcccctgagggaggcctgcttgtcacctggagatacctgccccacccccactctcgcctgagcaggtggaaggctcagcctgggagcctggcggcctgcagaatccggccagatccttctctcaggcatcctgataggtgggatgggccttgttttccagtcaaaccagaaaggcgtgggtggcgacacttccaccgagtggccgtccacagcctgctggggggacagatggaggggctggtcctttggccacgctcctcccgagcgccggattctctgaggggcgccttctgcgctttggggctctggactcggcgctcggggcccaagggccagagccgctcctcggagcagctgggggaggctgggccttgataatcgccccagagacccacggtacgtgacggcacccacagcgctggaaggcaggatctgtgtctgtgccccattttgcaaacggggaacgggatcagagagggggagcagcttggccagggtcgcgcagcagaactggaatttgagcacgggccgtctgtctggctctggcctgcctaactagtcctcccacggctccttccatcccctttcctggcccccggataccagcaggagatgaaatccccctaccctgggggctgagaggaaggacggcttatcctcataccctcagagctgccttgcaagggagctctcacacaggagcctggggcagggctggagtccagctgacatgggtggctcagggaggggcctctgcccctccagctctcaagacagctccgcaggggcctgacacagtgcacagtagtcgctcaacaagcattcccaatgagccgctgagcgaaccctcgagacaacactctagggctgatgaccatctccccactgtctggatgggaagactgaggctggcagagggggagtgactgctggggtggacccaagggctgggctaggactggaccatgctcacccccacccaaggctcacccccacccaagctcgttcctcttgtccttgttgcccagggctactgcagggcagtttatggtctggcaggtgacaggtgggggtgcaggtgtctcacgcagttctgacccacaccccacactcaggtctctgccatgccctgagctgacctgggagtttccgccgcggaggagaaaagacaccacgggtggctttgcaggcagcagctgggggaccctccacagccccaggaacacagcgcgccccggctgcaggggtcacggggctcatccaaggtcgcagagcaagcgtgccagcattccaacccttgaggagccctccttggagcatctgggctgcagtgggctggctctggggaggtgacctcggtctcctctggtcataaaacccagagccctgcccgcctctgaggaccaaggtgagacgagtttgtggctcggcaggattgcagaggggcctcgtatgcacgtgcgccagccagggcctgcccggtgaggcagggaggcgagagggctgtggctcgtgctgtgtgaccttgggagccatgctggccctctctgagcctcaatgtcatcttcggacacagggtttaataagcctcggtgacactccatttgcaggcaggtgcctgcagttgagcctctactgccaacctccggccctgcttaaagacaggtgggcaggcgcccctgggccaccacacagtgggaggggactttggacaggccccgagctggaaggatggagcacagggggcagctctgaccccacctgagtgaccttgggccgctctctgcttccccctacgcttcagtctcccctgcctagtaccggcacctgctccgaggcttgctctaacctccggagtttccaggctcacatttgacctcccctcccggccttggtttcctcctcatatggcaacggggatctgccaccaggtggacccagctataggtcagagggactcaaggaaagaaaaggaaaaaacaaacaaacaaacaaacacccagcagggatttgtgatcgccccaggaacctttccgaccaggccccaggctgggctctgcctcggccgcgcctcagtctcccgcacagagcaaaggacccatccactgcctgcggccgcccgcgggcctctgccgatgcgtggctgcccgcccgggcccaggtgctgactggccgccacgcagccaatcggaactgaataataaataccccccggactgacccacgaattaaaatttcagtgtcccggttggctcttctttccttccttagacttcgcttttccagcggccggctcctgcccccccttctcccccaagctctgtctccacagcgatggctggtggtaaacagaggccccggccccgccgataggtgctctcggggccccatggcgggtggccctcgcggacaaacgcccccggcctgaagccctcaggccctggcagcagcagggctgggcttaggcctggcctggcctgggcccctgccccagcctggcctccccgggacctctcccagaccagtttgccaataggaagtgatcggccggtggtggggaggcacccccagtgtgggagcggcacgctcagggttacgccctggtccagttctgaggttggggcggggggcactgacacggaatccccacgccctctccggaggcagctggcagggaggtgggggggcccaccgagcccgccacccatgggtgagccaggtgggtgccgcgggtggcaggggcaccagcacctctgtgacttccgccgcctgactggggggagaggagttgctgcctccccccgcctcgccgccaactcctggctgcattccgccaacatttagtgggcgccgactgggtgtccgggcccgggtggacagcaacctcccgccgcggcccaccgtgcgcccccgccagccagcccgggcagcgcctcccagaacccgcagaggcccggtccctgggggggcacccgctcctccgctccgctcagcccccagccaggctcccaggccgggggggctgggtctcccgcccgggaggtagggagcgggagggagggggctggatcccaccagctcccccctcccctgcccgggctcaggcttcgcacgtggtggtggcgtcaagggaaaggagggggggtccgggccagaggagacggggtcacgcgctttgggggcgcggacggcggggactggggtgctctctccgccccctcccgcgggtcggagccggacggccgtccgggcagggcgaggggccaggccaggccccccacccggggctgagtcaggcccgggcgggggcaggaagcggccccctcccccgccccggccgcagcgcgcggcccccgcccggcccgcggtcccccgccgcctcgcccgcgcggggggctcctacctccttcccggggcagcggcgagggggcccggccccggcggcggcggtggcggcggctgcggctgggctggctccctccgaggggccgggaggcggcagtgagcctggccccgcgccaccccccgccgccggcggccaatccccacccgggctggggggagggcgatgcaaattaccccggatctgggtccgcccgcccgcctcccccacgcccgggcccggcctgcgctaggccgcgcatccccgggctcgcctgcaccgcgcggccgcccgggccgccgccctccccggggagcgcggggagggtgaccccccccccacgggcggggggccgaggggaggggggctggggacggttacacaaccaggcggggaggggccccggggcggggagggggccggcccgcgggccgcgcagccggaagccgggaccgccaccggcccccggcgaggggagcccggctccaggccccgccccctggcgggctggccccgcccccgcgccgcgccgcgcgatcggcccgcgcccattggctctccggcccgccgctcaccgcccctcctccgcaccgcccctacccgcaggccgcggcgggctgtcggcgcggggcaccctgggacttgtagtccaagccgcttgccacctgccggctgcaaacggcggagggactacgaagcccagaggtccctgcggccctgcccgcccacccggacaccccaccccttccccctcctttccgaagcccccctccctgttttttcagccccctcccccccatcccccatggagctcaatcctggccaactccaacgtatgcacgcagcaccgaataggcccccggggggcgagagcgcccctcgtcttcagctggaaacttagcaggcgacgcgcccccctatctccccacgccggctccccccaccctcaatgcagccctgcttcccctcccccgctccccgcgcgcctgggagccccgaaaagccatgcacccgggttggggggggctggcgcacaagctcatgcacttagcccccaatccccccttcccgggcggcgccccctccccgcgctcgggatccagggcgcctccagcctccgggcagctgccaaccaccccttcctctgaaacttgggggaacgtccccggctccccggatctccccttcccgagggggcagcggtggccgcagcgacccccgcccgtccccgccctgcaccccgtgccgggggccgcgccgggcgctgacttacctcgcggggccgggccggggcgcgcggggccggggcccgaagttgggactgggctccctcggccgctcgcctccggggtccgcggcgctcgctctgcccgcgtcgcgctgccctggtcgctccctcgcgcggcggcggcggcgtcactgcccctacagtaactgtacagtacagccaaagccccgtatgatgctcgcgactcccttcctggtttctccgagggcaagaggggtcctcccttgtcttaaaggtgccgcagccgccggcccccccacgcccagcccgccccccccagcctggcctcggaggccagaacaggctcggcaggtcccctcttgccacgtctctgccctcccgtggggcttcgcccgctgcgccggggagaccgggctgttattaggttttgtcaagtcgggggggggggtccggcccgccccggcgcgcccccccgcctctgacctctccgccccgccgcgcggcgccgtgccagcttgccagcttatctggccccagagctccccggggcgcggggggagcgggccccccggggtggagggggggtgggggcctccagataaacaggcccccagcctctgcgcaggggcggggtgcgggggggcgcgggctgtgcccccgacgcccggggcgtggcaggatggcagcgggggcggggagcgcggtgcgcacagcgaggagcgacgcgggcgtgtgggtcgcgcggcctgggctgccgggggtgggttgggggtgaggcggtggggatccccccgcaaggccaggccctgggcctccccgggcctcagtgggacttgccgcgccagggaccccggggggtggccttgccaaggacagcccgggtccgcggggctcccgggtccctaaatgaaaccaccaacctgccctcccgcgattatataaaggagtcgcctccaccccgctgcgctaggggcgtcagcgggggaaggggttggcgaggggcggggagggcggttgttttcccggcttcgcgagttcccccacccggctgcgggccgcggggcgggacggggaccgggccctggacgcctggtccgcgcgggccgctccttggcacaagggggtctgcatggctcgcgaggggcggaggtggggagtggggaggcgttggttcagcgcgacttttttttttcccctgtccgtttctcccacttcctccccggtcgtgggagaggtccggcgggggacagggaagggggagcagggcacgagtggtgagaacgtcctggcccggcccggggagggctggctggtgcgaccgcgcgcctgggggggggggggagggctccaggactcagtttccccttcctcattcctccagacagagagagtactgacagctgctttagctgccgtttagtgagcgcttatccagtgggtgaccctgttccggggctcactgtgccttcattctaacacctaatcccagggtcattattatgttttattattatctggcattcttagtaccaacaccacctgacagcgggaaccaccaccggcctgggtgtagtgtacccagcctgtcctctgacttcaaagcctctcctgcgagagacacagtttatggcttcttcgcacaatttattaaaagcgcctttcaacacccaaacgggttggattggcttttgtaataataatctggctacgaggggaaacccgggagggccccccggaggggaagtggactgtctcaggactcgcagcctgaaaccagccgggtaggtgggaagggacccagggaggggccgcgtggatctagggcgagggtgtcatccagggactttgctccaaggaccctgcctgggatagaaatccttcttccttcaaccaccggccatcagcctcgggaccaggaggccacgctgaagcacgattcttcccagatcccactgttgtgtttggatttctgcaaatgatgcccagacgtttttttttgttttgtttttttgttttttgttttagacagacttgctctgtcgcccagcctggagtgcaatggcacgatcttggcttactgcaatctccgcctcccgggttcaagcgattcccctgcctcagcctcctgagtagctgggattacaggcacctgccaccacgcccggctaatttttttttttttttttgtatttttagtagatacagagttttgccatgttggcaagcctggtctcaaactcttgacttcaggtgatccaaccaccttggcctcccaaagggctgggattacaggcgtgagccaccgtggctggccttggttttttttgtttgtttgttttgttttttgtttttttaatagagatttggtggggccgtgggggggtcttgctatgtttcccaggtctcaaactcctgggcttcagtgttcctcccacctgagcctcccacagtgctgagatgacaggaatgaaccatcgtgccagcgagacgcccaggctctaagctctacatggtctaacttcccccacaccaggagcagcaggtgactcagtttcccctcttgtaccaccagcctcagatccgatcctgcaggaaaaggatcgagaaagccccactcggattctccatggtgagaacctgactcagaggggcaggggctcctctgtgagacgggcatggaccctaatcctcatcgcagccctgagaagaagcagagactacaatttccaccatacagttggggaaactgaggcccagagatggacaaggagcaaggatgttaagtccagcattcgcgtgtctctggacgctgccagggggaccaaagggaggtccttcaggaagtgccaggatgtggcacaccccaaaccacgccccccgcccctgtcatgaaaacagaacgaaggggacccaaagcttcctcctgacctctgcccttcacttcctttttcctcccccaaccaaaaaaaaaaaaaaaaaaaaaaaacccgagttgatactattgaaaacctaataaagtataaaagattgggttgctgtgtgatcttgggcaggttgcttaacctctctgatcctcagactcctttggagagaagaatcgatgcaacttcctagtgttgtgacaagggagaaatgagacggtgcatggaacgctgagacagcacaacccctgcaccagggaggtcttcattacatgataggtgtgattatattattaatgtttgagtcacgcctattatttttgtctctgtgtagccaggggttttctgtttgtctgtttgtttgtttgtttatttgtttgtgagacagaggttcactcttattgcccaggctggagtgtaatggcacgatctcggctcaccacaacctctgcctctcaggttcaagcgattttcctgcctcaacctcccaagtagctgggattacaggcatacgccaccacatccggctaattttttttttttttttttttgagacaagtctcacactattgcccaggctggagtgcaatggcacgatctcggctcactgcaacctccgcctccctggttcaagcgattctcctgcctcagcctcctgagtagctgggattacagccgcgcaccaccatgcccagctaattttgcgtttttatagagatggggtttcactatgtgggcaaggctagtctcaaactcctgacctcatgatccgcccgcctcggcctcccaaagtgctgggattacaggcataagccaccgtgcccggcctctaattttgtatttttagtagagacggggtttctccatgttattcaggctggtcttgaactcccgacctcagatgatccgcccacctcggcctcccaaagtgctgggattacaggcgtgagccaccgggcccggccgtagccagggttattatccttggtggatagatgtagacaggggaccagggaggaggagtaacttagcaaagacacaaagggagtggctggggggacttgagtttcagttacgttgactagactgtgctgtgaagtcatgtaatattttattttatttttatttatttatttattttgatacggagtctccctctgttgcccaggctggagtgcagtgccgcgatctcagctcactgcaaccttcacctcccgggttcaagcaattcttgtgcctcagcctcccaagtagctgggactacaggtgcacgccaccatgcacagctaatttttgtatttttactggagatggagtttcaccatattggccaagctggtctcaaatccctgaccttgtgatccacccaccttggcctcccaaattgctgggattacaggcatgagccaccgcgcctggccccatctccattttttaaaaataaatgaataataataataatgaaatagaatgtttattttattttattttatttttttgaggtggagtctcgctctgtcgcccaggctggagtgcagtggcgcgatctcggctcactgcaagctccgcctccagggttcacgccattctcctgcctcagcctcccgtgtagctgggactacaggcatccgccaccacgcccggctaattttttttgtatttttagtagagacggggtttcactgtgttagccaggatggtctcgatctcctgacctcgtgatccacccacctcggcctcccaaagtgctgggattacaggcgtgagccatcgcgcccggccgaaatagaatgtttataacagcataattcacaacagccaaaaggtggaaacaattccagtgtccattgctattattcttttctttctttctttttttttttttttgagacagagtctcctgtgtcacccaggctgaagtgcagtggcacaatctcagctcactgcaacctccatctcccaggttcaagcgattctcctgcctcagcctcccaagtggctgggattacaggcacctgccaccatgcctggctaatttttgtatttttagtacagaagaggtttcaccatgttggccaggctggtctcaaactcctgacctcaggtgatccacccatctcagcttccctaagtgctaggactacaggcatgagccactgcgcccagcttccattattagatcaatggataaacacagcataggacatccacacagcggaatatgactcagccatgaagaggagcaaagctctgatgcaggccacagtgtggatgcaccttgaggacatcatactcagtgagagaagcaagacacaaaagtccaaactgtgtgatcccatttctctgaaatgtgctgaacaggccaatccatggagatacaaagtggatgcgtggttgtcagaggctggggaggggaatgggggtgactgctattggacatgaggtttattttggtgatgatgagaatgttctgaagttatatagaagtaatggttccataactctttcaatattctagaaacaactgtgctttttatttttcatttttatttttatttattttctttctgacggagtctcgcactgttgcctgggctggagtgcaatggcacgatcttggctcaccgcaacctccgcctcccgggttcaagcaattctcctgcctcagcgtcctgagtagctgggattacgggtgcccgccacaacgtcccactaattttttgtatttttagtagagacgagatttcactatattggccagactggtctcgaactcttgaccttgggaaccgcccacctcggcttcccaaagtgctgggattacaggcgtgagccaccgtgcccggccttgtgctttatttatttatttatttatttagagacagagtatgactctgtctcccaggctggagtgcagtggcgcaatcttggctcactgcaacctctgcctcccaggttcaagcaattctgcctcagcctcccaagtagctgggactacaggcacacaccatcatgcccggctaatttttgtatttttagtagagatgaggtattaccatgttggtcaggctggtcttgaacttctgaccttgtgatccatccgccttggccttccaaagtgctaggattacaagtgtgagctgccgcgcctgacctattatttacttatttatttagagacagagttttgattttgtcacccaggctagagtacaatggcgcgatcttggctcaccgcaacctccacctcccgggttcaagccattctcctgcctcaacctccgagtagctgggattacaggcacccaccactacaccgggctcattttgtatttttagtagagacggggtttctccctgttggtcaggctagtctcgaacttctgaccacagatgttccacctacctcagcctctcaaagtgctgggattacaggcgtgagccaccgtgcccgacctaattacttttctttttattttgtagatagagacagagtctggctatgttgcctaggctggtctcaaactcctgggctcaagtgatccaccagccttggcctcccaatgtgctgggattgtaggcatgagccaccgtgcccggccatgccttcctgtctcatttattcactggacaaaaatggaccatgtgctttccatgggccaagtccctgctctccagcgtacaggctagaggaggctaaagatagtaagaaagaagacaaatgaatacaaggattccagacatcatgagtgcaatgagaaaagcaagccataggaatggaaataccaggaccagtcctggagaattgttttttgtttgtttgtttgtttttgagacggagtctcgctctgtcgcccagcctggagtgcaatggtgcaaccttatctcagctcactgcaacctccacctcccgggttcaagtgattctcctgtctcagcctctgagtagctgggattacaggtgcatgccaccacccccagcaaatttttgtatttttcgtagagacggggtttcaccatgttggccatgctggtctcgaacttttgacctcaggtgatccactgccttggcctcccagagtgctgggattacaagcgtgagccaccatacctagccagggaatttcttttttttttttttttgcataattaggaaccaagcgcagtggtgcatgcctatagtcccagctatgtgggaggctgaggcaggaggatcacttgagcccaggaattggtggctgcagtgagctatgattgtgtccgtcagtatcctctgcactccagcctgggcaacagagcaagactccatctctaaaatttaaaataataataataggccgggcatgctggctcccacctgtaatcccagcattttgggaggctgaggcgggtggatcacctgaggtcaggagtttgagaccagcctgaccaacatggtgaaaccccatttctactaaaaacacaaaattagccgaacgtggtggcgcacgcctgtaatcccagctactcaggaggctggggcaggagaatcacttgaacccgggaggtggtgagccatgatcgtgccattgcactccagcctgggcaacaagagcaaaactctgtctcaaaaaaaaaaaaaaaaaaaaaaaagggccgggcacggtggctcaagcctgtaatcccagcactttgggaggccgaggcgggtggatcacgaggtcaggagatcgagaccatcctggctaacacggtgaaaccccgtctctactaaatatacaaaaaattagctacacatagtggtgggtgcctgtagtcccagctactcaggaggctgaggcaggagaatggtgtgaacccagggggcggagcttgcagtaagccaagatcaccccaccgcactccagcctgggcgacagagcgagactccgtctcaaaaaaaagaaatgctagaatggatctacaaatagaaggaagacgacgtgacgatacacaatgaatttgttttcttgtggacaggaatcgttgcaattattatcagttttctacaacttacggggttgtgaaataactcaaagatagcaaaagacacagagatcccacagaatcagacaaaaccgacttgtgcctagaggctatttcattttttaaatagtcctgaagggcctacacggtggctcacgtctgtaatcccagcatcttgggaggccaaagctaaaggatcgcttgagcccaggaggtcaagatcagcctgggcaacatagtgagaccctgtctctaccaaaaaaaaaaaaaaagatcatgaagatgatttcttcaaaggaagtgatgtttgagcagagatcttttctctcctttctttctttctttctttctttctttctttctttctttctttctttctttctttctttctttctttctttcttttattttggagacagagtcttgctctgtcaccaggctggagggcagtggcacgatctcagctcactccaacctccgcctcctgggttcaagagattctcttgcctcagcctcccgagtagctgggattgcaggctcctgccaccacgcctggctactctttgtatttttagtagagacagggtttcaccatgttggtcaggctggtctcgaactcctgacctcatgtgatccacccatgttggcctcccaaagtgctaggattacaggggtgagccactgcgcccggccatgagcagacatcttaatgaagatagaattagctgaagacctccgtatgtttcctaggtgagaggaacagccaaggtgcccagagtggctgcagttgggagccagagggcacccagtggggacttgtggccgtggtgcaggctgtggactttatttaaagtgttctgaattcagccatgaaaaggaaggaggctctgactcaggccaccgcgtggatgaaccctgaggacctcacactcagtgagggaagtcagacacaaaaagccacacagcgtgtgatcccatttctatgaaatgtccaggacaggccaagccacagaggcaggaaggggatgcgtgggtgccggggtcgggaggggcatgggtagtgactgccgatggggatggggcttcctttctggggtgataggttctgcaactagatagtggtgatagttgcacaagtctgtgaatgtattgagaatgactgaatcgcaccctttaaaaagggcaggctcaaggctgggcgcggtggctcacgcctgtaatcccagcactttgggaggctgaggcgggcggatcatgaggtcaggagttcgagatcagcctgaccaacatcatgaaaccccatctctactaaaaatacaaaaaaaaaattagccgggtgtggtgacgtgggcctgtaatcccagctactcaggaggctgaggcaggagaatggcttgaacctgggaggcggaggttgcagtgagccgagattgcgccactgcactccagcctgggcaacagagtgagactctgtctcaaaaaaaaaaaaaaaaaaaaaggacaaactcatgcctggaaccccagcactttgggaagccgaggcggctggatcacctgaggtcagaagttcaagaccagcctggccaacatgacgacacccatctccactaaaaatacaaaattagccgggcatggtggctcatgcctggaatcccagcactttgggaagtcgaggcagccagatcacctgacgtcaggagttcaagaccagcctgaccaacatgacgacaccccatctccactaaaaatacaaaaatcagccaggcatggtggtgggtgcctgtaatcccagctacttgggaggctgaggcaggagaatcacttgaacctgggaggcagaggttggagtgagccaagatcgtgccattgcactccagcctgggcaacaagagcaaaactctgtttcaaaaaaataataaataaataaataaataaataaataataaaaggtacatattctggtatgtgaattatatctcaatttatttatttatttattattttattttttgagactgagtctcattctgtcacccaggctggagtgcagtggtgtgatctcggctcactgcaacctccacctcccgggttcaggtgattctcctgcctcagcctcctgagtaactggcattacaggtgtgtgccaccacacctggctaacttttgtatttttactacagatgtggtcttaccgtgttgaccatactggtttcgaactcctgagctcaggtgatccacccgcttcggcctcccaaagtgctgagatcacaggcgtgagccaccgtgcccggcctgggagaaatactttctgagctgctgatttctccatggcttctgaattcatagcggttggggagatggtgcctgggtattttcacctgggcagctgctaagaggtgacttctatttgttccagaagacagaagccttggtagctatgctgggactggatccgtgtccaccacaccactcagaattcccatctgcaatgggtcccttctgccccgtttttaccaagcccagttccctctctgcaactgagaggcagcctcttgccccaccccctctcttccagactggatggctgcctcccaggcacctctcaggacctggccacagagctccaaagcccagggcctgctgccttttgggtcatggctcagggcccagtctctacctctctctgtggcccagtaccctttagctcaggaggtctcatctggagtgactctgcctccttccaggcgatactgggtgatatctggagacatttttaggtgttgtgattggggagggggtgggtggaggccagggacacagctcagcaccctgcagtgcccaggacggacccaccccagaggttgatcaggtcccatagtgtccaccacaccgaggggctgaaattctagcctgggtctaacttcagtcttgctcgctgtagaaggcacccacacacttctctcctctctgtgctctgcagagaagaaaagccactggccagtgacccctggacaaggcaggacttcagccatccactgccctccaccaccacccctgggcacccccttgtccaaagcagacagtctctactctgggataagggggggaccctggccccaggctttacccactttggggtgattcctggaccctggagatggaccccaagggtcaccctcaccccacgggacctcccaacaatggacaaggccagtctgtcctctcccccagcccccagttgtgcagaatcctcaacatggcacccccagtgtggagctgaagactccagacttcaggggtgggggcggggctgtgggaggggagatcatggctgcggttctggtccagccagacctcctgggtttgttctttttttaagaaccaccgcaatttaaagagcggagtcctccctccctgcagcccacctgccacgtgggctggcccctgttcccctctccttctctccgtctctgcctgccgggcttgggctgcgggggccggagcttccgtttcactttggtatcaccggtttcactttcagggctggggacagagagaggagaagagggacagagagatggacagagccggggagggtggccttgttaagtcgggggccggggaggggtccaccacctgccgctccttttcctgaccttcctgaccttcttctggcctggccggggcgggggggggggggggggtcctggaagtcaaggtcatggggtcaaggtcaagttctccctgtgtgaccttgggtgggagaagcaacttcccactatccctgagcctcctttcctgaacccctcagttacccaaaagtggggctaagaatcacgtacaccccacccggcgctgggaagttcaaagattcctccagcaccgcggaccatcccataatgtccccgtgggagggggcggggccaactcccaggcagaacaggatgtcggccgctcctttggccagggagagacccttggcccagaaaccaccgggaaggaggctccgggctgcccgagtcccgagcccgggatgagccactgtcccccagaacccccagcggaggctggagctctgtccgctagcagatccaggctggaaattcagttgggcatggccttgtcccaccccacctccatccccaccccaccctcaggtccttcctgcttggtgggggcctggggcttgagccactcactcaagagcagggactgggacccactgacctccctgtccccagcacccccacagggcccagtcaaggtggggcaggtgcttggtgctggtcagacaggataggggagtgaccatttgcatgtcaatatcaataacatatctcggtagagataggcggttagtctgtgtcaaaatgtgagagggcggtagttttctttttttttttttttaacagctttattgagatataattcacatgccatgcaattcacccatttagagtatagagttcagtggttttttgtttttcttttttctttttttggagacacagtctcactctggagtacagcagagcagtctcggctcactgcagcctccacctcccaggttcaactgattctcgtgtctcagcctccagagtagctgggactacaggcgcccaccaccatgcccggctaatttttgcattttagtagagacagtgtttcaccatgttgcccaggctggtcttgaactcctgcgttcaggcagtctgcccgcctcggcctcccaaagtgctgggattacaggcatgagtcacctcacccagcctcagtggtttttagtatagtcacttggctgggctggatggctcacacctataattgcagcaccttaggaggcgaagaggggcagatcacttgaggtcaggagttcaagaccagcctggccaacgtggtgaaactccgtctctactaaaaatataaaacttagccaggcatggtggcttgcacctgtaatcccagctactctggaggctgaggtgggagaattgcttgaatccgggaggcagaggttgcagtgagccaagatcgtgccactgcactccagcctgggcaagagagccagactccatctcaaaatataaacattaaaaattaagaaaaataaaaattagcctcttcattgtaaaacgggaataataaaaagagagaaaataaataaataaatattaaccagccgtggtggcaggcgcctgtaattccagctagttgggaggctgaggcaggagaatcacttgaatctgggaagtggaggttgcagtgagctgagatcacaccactgcactccagcctgggcaacagactgagaccccgtctaaaataataataataataataaaaaaatggatagaaaggcagcaccagctggctgaggtgctgaggggatccacctgggctggcagctctgtgctcctggaaaagccccttctccaccccacacagggcaggaacccaggacttccaaacaggaggcttagggaggctgctggaaccttagaaacccacattagcagtccagtgcagtggctcacacctgtcatcccagcaatttgggaggccgaggcaggtggatcatgaggtcaggagttcaagactagcctggccaacatggtgcaaccccagctctactgaaaatacaaaaattagccgggcgtggtggcaggcgcctgtagtcccagctactcgggaggctgaggcaggagaatggcgtgaaaccgggaggcggagcttgcagcgagccgagattgcgccactgcactccagcctgggcaacagagactcttgtctcaaaaacaaaaaataaataaataaaaagggaaacccacgttagcatttacaggtggcgccctgcggaggcccagagaggtacagagacaagtgggctgggtacacaatggcccctcccctttaatgatggggagagggggcatggcgcggtgactgacacttgtaaccccagcactttgggagaccgaggcaggaggatggaggataccttgagcccaggacttggagaccagcctggccacatgacgaaaccctgactctacaaaaaaaaaaaaaaaactagtcaggcatggtggtgtgtgcctgtcatcccagctactcaggaggctgagacaggaggttcacctgagcaggaggctgcagtgagaggtgatcgtgccgccactgccctccagcctgggtgacagagtgagatcctgtctcaaaaaaacaaacaaacaaattatggggagagaaggggaaagggagaggggatggggaggggaaaggagggaggaggtggagggagagagggaggggtggggaggggaagggggagggggaagagaggaggaggagaagggggaggggatggggagggcaggaggaaaggagagggggaggggaagaggtgggagggaaagagtagggaggggaagacagggaggggagatgaagggaaggggagggagagagggaggggtggggacgggaaggggaaagggaaaagaggggaggagggggccgggcatggtggctcacgcctgtaatcccagcactttgggaggctgaggcaggcagatcacaaggtcaggagatcgagaccatcctggctaacacagtgaaaccccgtctctactaaaagtacaaaagttagctgggcgtggtggtgcgcacctgtaatcccagctactcgggaggctgaggcggaagaatcgcttgaacctgggaggtggaggttttagtgagctgagattgtgccactgcactccagcctgggtgacaaagctagactctgtctcagaaaaaaaaaaaaaaaaaaaggtatggggagtgtagagtggatacctgcaagtgtcagctaggactccagtctaatctcccttgcagggttccacattcaggatctcctctttcctcagcccacctggctctggcactaggatcttatgaaatcccagggagctccctcctgtgtctgtgatcattgctcctcctcccttctccttgatgctcctcctcccttctccctcctcctagatgctcctcctcctccctcccgcctccttcttgcccctcctccctcctcctccctgcccctcctccctcctccctgctcttccttcctccctcctactcccccctcctcctccttgcctctcctccctcctccctgctcttctctgctcctccttcctccctcctactcccccttctcctctttgcctctcctccctcctcctttcctctcctccctcctcccccctgctcctccttcctccctcctactcctccctcctcctctttgcctctgctccctcctccctgcccctcctccctgctcttccttcctccctcctcctccttcttgctccttcttcctccctactcacccctgctcctcctctctcctcttccctactcctcctccctccccctactcttccctgttcctcctccttcctcctctctgcccctcctccctcctcctccatgcccctcctccctccttcctcctccaagagcccagggagcccagtgtccgtggggacagagctgcaaaggcctgacaggaagggtctcccgaggcctgagaaacggtgtgagcttggtattccgggaggaagggggacccaggacagccactcagggcccagcctttgtctctgcacagagctcaaactggcttgagggaggaagggaaggcgacctggacggcggtgttcctgggagtgcgagttccagatagttctagatactgacggaagttgcggcaacatctgcatttgaacctgccactgctccaggcctggtgacctccagcctttaacctttgtgtgcagtgagccttactccaagaggcaaccagccaccagccaccagccacactcagggggcccagtagggaccccgtgccttggagggccctcagtgccatcttggcagcgatgccacagctcaggaggttgtgccaggggctttcaaagctgccccccttggccaggagcagtggctcacgccagtaatcccagcactttgggaggccgaggcgggcggatcacgaggtcaggagatcgagaccatcctggctaacacggtgaaaacccgtctctactaaaaaatacaaaaaaattagccgggtgtggcggcaggcacttgtagtcccacctactggggaggctgaggcaggagattggcatgaacctgggaggcagagcttgcagtgagccgagattgcgccactgcactccagcctgggtgacagagcgagactccatctcaaaaaaaaaaaaaaaaaaaaaaaaaagctgcccccctttcttgcctggagggaggaagggatctcagcttcatggccatattttgaacctcgttgctcccagcccgcgcccccagccaggctgggcctctccaagggcccctgtcacccagtcctgccacccagcctttgctgacaccgttgcccatgttggccccgccactgttgggaatgtcctctccagccctcagctgtggattcccctccttcccaggacttctcctctaggtgctggctaaatttgcctttagcccttagggcggctataaattctaatttctgggcccgagcgagcgccgtggggaggctgcaggctccccagcgatggacaggggctcttatcttttaggatcccacagagcactgcagaaaagccccaaatatttgtgggtcacgaaggcagtgtcctgtcaggggagacagcaggatggtgggaccacaggatcgtccatgtcttccctgggggaggttcgagtcaccttcagaaggtcacctaacttgcagggactccgctgccgcagaggttgtgtggggagaggcaaacctggtcagcctattttgtggggtgcaaacagaagggatgtgggcctcctcggaagtctgcagagaggattcgctcctccgtggacgcttctctcttttcttgagcctgtgatgagttcctttgcaaatagggaaactgaggctctcagaggggattctatcttccccaaggtcacaggcccaaggacagcagaaatatcgtcaggcctgtggtcctgatgttcaaacaggaggccctggctggccgcagcgactcacgcctataatcccagcacactgggatcagaaggattgcttggggccaggagttccaggagtttcaggccagcctgggcaatacggtgagaccccatctctacgagaaagtttcaaaaaatgagctgggcatggtggcgcgcgcctgcagtcccagttactcaggaggctgaggcaggaggatcgctggaacctgggaggcggaggctgaagtgagctatgatggcgcgccactgccctccagcctgggcaacagagtgagaccctgcctcaaacaaaaacgtaaacaaaacaggaggccctgctctcctgaggggctggtggtgagtcactggtagatgggagagagctggggtcagggtcccagctgggggggtgggtcctcacctgtgctaccctccagggggcctctctccaggcctctgtccctcccctgggaagcctggcagaaacctgagactgggcctccagttccaggtcgccactgggcccaggcctctcctgtccgcctgccagggactgcggaacaggtaactcctgcgccaccctaaacccacctggcctgttgctccaggtgcggcctggaggccccggggcctgcacacctggtcagctcagaggccaggaagaggagcggagggaggggtggggccgccggccgctgctggtttcgttttgagccgggccccttcttcctccctccctcccactcctcgccagacccctgcattctgggaaaggctgtgacaacttcctctgaactctccttaacctgccctggagcccagggcctccaggaggctgagttccgcctgcgggacctgaggcttcctgcaggtcacacacctccacccctggccacgtggccctagaccgcccaccttctagaagcttctttatgtgctgccccatcatgtccccaccccgggtgcagctgtcccctgcctgcaccccctccaccctgtgtcccagactctgcacacaggaaaccgccctggccccagggagggctgcctgagacccccgcctccaacctgcactggggacatctgggctggatggtcctcgggaggtggggctgccttgggcactgcagggtgctgggtgacatctctggcctccatccattccatggcaggggcaccccctgtctcgacaaccacagacgtctgggagtttccaagcctcccctgggtggggggacagaattgttcctgctaagatccagtggattaaaagacatctgtgaggggacagaaatgactgagttttgtgccggccggtcaggcagtccctggcagacaaaattcccaagtatttgcatccaaaaaaacaaaacaaaacaaaacaaaacaaaaccacccagcgtggtggctcacacctgtcatcctagcactttgggaggccaaggcggtcagatcattgaagtcaggggttcgagaccagcctggccaacatggtgaaaccctgtctctactaaaaatacaaaaattagccgggtgtggtggcacatgcctgtaatcccagctactcgggagactgaggcaggagaatcgcttgaacccgggaggtggaggttgtggtgagccgagatcacgccactgcactccagcctgggcagcaaagcgagactccatctcaaaaaaaaaaaaaaaaagagagaaaaacctaaatatttcatattgattccaaggtgaaacgggaatattttggctctgctgggtgaaatatactatcaaatcatctgttcttttcctctattttgtttattaatatttatttatttatttatttattgagatggagtctgtctccctctgttgccaggctggaatgcaggggcgcggggtggaacaggtaactcctgcgcccctgcctcagcctcccaagtagttgggattacaggtgcccacaaccatgcccagctaatttttgtattttttgtagagatgggctttcatcatgttggccaggctggtcttgaactcttaacctcaggtgatcacccaccttggcctcccaaagtgctgggattacaggcatgagcccctgcaccagaacggtatttattttttttgagacagagtctcgctctgtcacccaggctggagggcagtggcatgatattggctcactgcagcctccgtctcctgggtttaagtgaacaggccggctaatttttgtttgtttgtttgttttgagacagagtgttgctctgtcgcccaagctggagggcagtggcacgatcttggctcactgcagccttcctctcctgggtttaagtgaacacgctggctaatttatgtttgcttgagatggagtctcgctctgttgcccaggctggagtgcagtggcatgatctcagctcactgcaagctccacctcccaggttcaagggattctcctgcctcagcctccctagtagctgggattacaggcgcccgccaccatgcctggctaatttttgtatttttagtagagatgggatttcaccatgttgcccaggctggtctcgaactcctgacctcaagtgatcctcccgccttggcctcccaatgtgctgggattataggcgtgggccactgtgcccagccctttctatttaaaatgttttaacagggaaatcctgctaaaactgggaaatgtacatttcgtctggggtgcaatgtgcacattgggttggggtggcagggatggggacaggacggggacgctatggcgtggtgccccgcgtggaatctcaccctctgggcggctggttgcttctccggcctcatttcatttgatgacctttccacttgccccaccccgaggcggttgttgcaggaggagaaggaagtatgtgcctgtcccagggccggcctgggtcccacctggggagaattccacaggatgaagcgagcaggcagtcgcctgtgaccccagcttcataaatcaaatatgttagcaaatcctgcccggcacacagcctggggcacttgcatggagccagtgactttttggtgtgtccggggacagactgcactatggagagggatgtcagggctgcccatgctctccggaggcagaagccagcacatatgagcaagtcaagcgctgtttatttacgatgaaaataccaagctggggggtgggcgtggtggctcacgcctgtaacctcagcactttgggaggccgaggcgggtggacggcttgaggtcaggagtttgagaccagcctgggcaacatggtgaaaccctgtctctactaaaacacaaaaattagctgggtgtggtgggcacctgtagtcccagctactcgggaggctgacacacaagaatcagttgaaccgggaggtgaaggttgcagtgagctgagattatgccactgcactccaggctgggcgacagagcaatactctgtctggaaaaaaaaataccgagctgggaaaacagccgacaaaacactgtaggagtcttcttggggccacaggtggtgtgccccaggtccacgtgggcctcagacatgggggcagggctatcatgttgtcgagaagtttttttttttttttttgagacagagtcttgctctgtcgcccaggctggagtgcagtggcgcgatctcggctcactgcaacctccgcctcccgggttcaagcgattctcctgcctcagcatcctgagtagctgggaccacaggcgtgctaccatgcctggctaatttttgtatttttagtagagacagggtttcaccatgttggccaggctggtctcgaacttctgacctcgtgatccgcccctcttggcctcccaaagtgctgggattacaggcataagccaccgcttccggcctatctggaggtttttaataaccacagaaaacctcaacacgtctgtgtaaaaccttccaatgtcaaggagtgagctgccccagggccccccaaggcctggctttcagtgacactcccttcaccctaaagccccgcaaacgttatttattatttattttttattatttttttgagacggagtctcgctgtctcgcccagcctggagtgcactgacacagtctcagctcactgtaagctccgcctcccaggttcacgccattctcctgcctcaccctccccagtagctgggactactggcatccaccaccaagctcgactaacttttttttgtatttttagtagagacagggtttcgccgtgttggccgggctggtcttgaactcctgacctcaggtgatctgcccaccttggtctcaaagtcctgggattataggcgtgagccacccagcccatgccctgcaaattttaaaatgctgcatgttttacaggaaagggtctggccccgggaggcagggaaatcctaccccctggactgcagcatgtccgtggccagggcaaaaaggggcatccccaggtgtgtagccacctttgggagcacccgggatcccttcccaggcctccacagtggagaaaatgaggcaacgagtccaaaggacagcaggcaggagggggatctcggatgaggcggcggctgggtctgggaggtttcttgggggagcaggagttgagagatctagaaaccgccagggtggacgcactcttgccacatctacaaagtagtttctagaagtctgaccctgaagcgaggcagggaagataggcaagaccacggcttctctcccgtccttccctctggggtgccgtggggctccaatgaagctgcaggatggctgcgcacaccgcagggatcctggcgcggggtccatccccacctagcccagactgcccctgctcccctgggactccgtgtcctttcattccttgccaatggcagggggtggccgggaccctggggtttccaggaccggccgaggtcccgccggtttggagcacaggcagccaacacattccccccggccctcccggcaatcctgagggtcctggttacccacagggcggcaccttcaacacttttttttttctcctattttttattttttggggccacactccgtcgcccaggctggagtgtgatggtgagatcttggctcactgcaacctccacctccccaggctcaggtgattctcctgcctcagcctcctgagtagctgggactacagttgtgcactaccatgcccggccaatttttttttttttttttttttttttttgtagagatagggttttactatgttgctcgggctggtcttgaactcctgggctcaagtgatcttcttgcctcggactcccgaagtgtttagattacaggtgtaagccaccaagcctggcttttttttttttttttttaagtcatgtgagactttagggcaaaacataaaggagagcagcctggggagctgtttgcaggaggtgtcaactcatctcttctttggtgtctgcagaaaaaaaaaaaaaaaaaaagccacacaagactagaagggtcaccctaagaagaaaaggacaatccagcagttcccacagaaccacaagcccccaccttctgctttgtttcctccagaaacacagttgccagccacccttcccctacaattcgcccgcagataatatcagcttgctggtagtctccaggaagtactgaagggggaggctcacagcctcaagagctttagagagctcagagggaccctagaacagcccagctgcccaccacacctagcccagaggtggcctcctctatccgagcacacagtcccgaaggtagaaaggctgggctttggatctcggacaaccggagaagcaggcgatgggcctccgggaaccccgaagaccccaggacaagccctcaccgtttcatctgcagcccactgcggcggaacagttcaaaggcccgaaagtgtcacatgccctggtggtcacttctgatttgttgggcgaggagaggtgacagaaccacccgccctgggctgggcctgctgcggacgcagggggagtgcagggcgtgtctcgggacctgctggggtttccaaccaaaccgacagcttggaaagccagcgcttcctttctgtggggctgagtctcagctcagctgccactgctgggagcccccactccctgaagcggggggacagggagaggatggtgccacgctggggaagaggcaggggcggccttcccgcggaggctacgtgacaggagcagtgtagaggaagtggtttccatcacggaaggccgaagctctgccttccacaggggcagagatggtggcggggaggacacagagggaaaccaggtggcatttcccttcttttttttcagtagccttgctctgtcacccatgccggagcgcactggcaccatcgaggttcactgcagcctcaatcccctgggttcaagcgatcctcccgccttaggctcccaaagcactggaatgacaggcatgagccgccgcccccagcctcactctccttccttttggtgagagccgccatcgcctgggggctcactgcaggtcttcatcccttgacccaaagggagaggcgagctctccctaagggagggccctgcgccctccagcctcggcgcccggcgatgcgggtcagctcagggatgtcctctccgtgctgggctgaagcaaagcccagcacccaacgccgaacggaagaaagaagcaggatggcgcggtttgctttttctctccctgttttgttttgtaacctaaggaagcagagcctctgagaccacacacagcagcgtcgcccgtccccagaggcaccccggccaggacgggcaggagaggagacccccgttcctgcatgcgctgtcgccccgccacggtgctctccgcaggggtgaggcaggagggtgggtggaggcgccagcctgtcctcagctggaagggcggggcatggacagggacggtgggcaggtcaccagcgggacgcagggagcccggccactgtcacacggcggtgcgcgtgggtgtgccgggctggttcagccgcagggttttacacaaccagccggcaaaatccacttcttccacctcggaccgcttgatgaaggtgtggttctgcaaggaaaggggagccgtgagcacccgggcctggagtcacagtaggacggggagggccagcgtctgcccagccctggcagatggtacgggacagaaagcaaaaaacagaggagaccctcccttccccacaggaagacgcactcggggtaggagagggaaagaaacccagaaaggggcagcggcgtgtgccaggcctgggaggggtctcaggatgctgcactccacctggggcggggacaccaccagcacggcagcctgcgctcccaggggagggtctacgctcgcgcaagcccagggtcctccggccgctgtggacaccggggccggatcattctctggcgtggggccatcctgggtactgcagggtactgagcagcgtccctggcctccacccactccatgccaggggcttccccaagtcgtgacaccacaatgtcctcagccattgccagggtcccccggagcaggacagcccaggcaagaacgggctgttccacagaactccgcgaagagcattgtacaggcaccgtcccactcgccagcacatgaggctccagagcccctggactgtggctcccatggcttgagaacaaaagcctcaattttatttcagtttaacaaattaattaaatacttttactttaattttttttttttttagatggagtttcactcttgttgcccaggctggagtgcagtggtgtgatcttagctcactgcaacctccgcctcccgggttcaagcgattctcctgcctcaccctccccagtagctgggattacaggcatgtgccaccacacccagctaatttttgtatttttagtagagacggggattcaccatgttggccaggttggtctcgaactcctgaactcaaatgatcctcctgcctcagcttcccgaagtgctgggattataggtgtgagccaccgcaactggccttaatttttattttttgagacagtcttgctctgtcgcacaggctggagtgcagtggtatgatctcagctcactgtaacctctgcctcccaggttcaagcaattctcccgcctcagcctcccaagtagctgggattacaggtgcgtgctaccatgcccagctaatttttgtatttttagttgagaccgggtttttccatgttgcccaggctggtctcgaaatcctgtcctcaaatgatccgctcacctcggcctcccaaagtaccgggattacaggtgtgagccactgtgcccggccccactgaacacacttcaacagccacgtgtgaccagcggttcctgtacaggacagcacaacatgagaagcctcttggttggaagggctgggggaggagggcgggtgcccttggggaagaggctgtgctgggccaccccacagtgggtgagtagaggcctttggggttcccaggagggtggtgtccaggaccttgggcccctgaatgctgcctcttttgcagctggaggcaggccaaggtgcctatcttcctaaaagtcggtgtaggtatgggtgaaaaaccaaccaacttgataggacacatcttggctaggtccaggatacccaacaggggagcatttttaagaagctggttcaaaaatggctatttcagccaggcccagtggctcatgcttataatctcagcactctgggagacctaggtgggtggatcacaagttcgagactggcctggtcaacatggtgaaaccccatctctactaaaaacacaaaaattagccgggtgtggtggcacgagcctgtaatcccagctactcgagaggctgaggcaggagaaccgcttgaacctggaagatggagtttgcagtgagccgagattgcgccactgcactccagcctgggcaacagagcaagactccgtctgagggaaaaaaaaagttatttcaacattagtacccctctctttttagttatttatttattttggagaggcacagtctcaccatgttgcccaggctggccttgaactcctggcctcagagagccatccccctatggcactaggattccaagtgcccaccacaatgcccagcctgcctcattaaaaaagaaaaaaagtcacacatgccaggtgcagtggctcacacctgtaatcccagccctctgggaggccaaggtgggagaatcatttgagcccaggagtttgagaccagcctggacaattagcaagaccctgtctctataaaaaaaactagctgggcaggtcgggcacggtggctcacgcctgtaatcccagcactttgcgaggctgaggcaggcagatcacctgaggtcaggagttcgagaccagcctggccaacacggggaaaccccatctctactaaaaatacaaaaattagctgggcgtggtggcagccacctgtaatcccagctacttaggaggctgaggaggctaagacaggagaattccctgaacctgggaggcggaggttgcagtgagccgagatcgtaccactgcactccaacctgggtgacaagagtgagacttcatctttgcggggaaaaacaaaacccacacacaaaaactagctgggcttggtggcacacatcggtagccccagctgctcaggaggctgagtgggaggatcacttgagcacgggagttggggctacagtgagctacaatcgcaccactgcattccagcctgggggacagagcaaggctgtatctcaaaaatttttttgaccaggtgcggtggctcacatctgtaatctctgcactttgggaggctgaggcaggtggatcacctgaggtcaggagtttgaggccagcctggacaacatggtgaaagcctgtttctactaaaaatacaaaaattagccgggtgtggtggcgggtgcctgtaatcgtagctacctgggaggctgactggagaattgtgtgagcctgggaggctgagactgcagtgagctgagattgcttcactgcactccagtctgggcgacagagtgagactctgtccgactctcaagaaaaaaacaaaactgaaagccacattccagtattagaaggcacccggttgggtgtctgtagctggcatctcttcttttcttacaggcacagaaagtaacgggctgtctaggggggtggcatctccaatccgccaatcagctgtcgaggggtttgaaggtcgctgacggtggctgtggtatgggaaagcactcgggatgcaggctgggctgagggcaggaggatgatgcccggggccctcctctgagggtgtagtccccgctggggaggcgagttttggtgaacagctgggcttccgaggatatcagaggatgggggtttaaggggacaccgaagtacgcacggcctcgggggacctgcttgccagtgtgcagaacagggatggtcaccctctagtttgcagggaaaggagcctggggggctgagagctgcctccagcctctcatgagggcaaagaagcccggggtctcatcctgtgggtgcgggaccagcaccaggcaggagcggcggagctcagagcccagagctgttcccacgcacacaccctctgctccccgcagccagcccaggatggcttctctcatggatgagagagacccacagagggtcctcggcgtggcctggcacacccggcctgcccacatcctggtcgcaggtgctggctccccgggcagggccaggcccagcagccttatttcctggggcctgggtggcagcctgcaccctcccggtcccagaacccgctggcatcactcactgtgagcatcttcaggtccgcccgctccgctgggttcttgatgaggctgggggttccaagaggcaggaccgggaggcggtggaggagacaagacagggcagtcagctggtggccccggggcacccgcgtgtgggccgtggtcggagggggcctggatctctccgaccagagagagtggcacagagtggctgctctgttctgcctcctggcagaggacgagggatccacctctgcactttggtgccaggggcaggacaccccccagcgggagggtgagagggaaagagggtgggaaaccccgcctggtgggtcagaagcctggacgcaaccccagctaactgtctaataaaaccccaggcccggggcaacatcgccggagcgcacgccaagggcccggggcaactccggcaccaggagtgcggtgccgttccacggcgtcccgagctcacacacatggaccggccctgtgggcagcggggtgtccgcagctccttccccgtggtctgcggcacatgcctgtgaagcccacgccacaggtgctgctgggtgcttgggggcaggagaatggagtggggctggcgaccctcccagaacctgcgggcggatcccggggagcccacagtcagcacaccaggggtccggggaccagacagaggcttctcctgctgcagacagtgagctggggacaccgtcatgtgcacagggcctgcaatcctgcttcacccctgggctcacggacaggatggcatggcagccgggagctgcagccccacagctctgggaaaaggaatctggcttcccgttgggctgagtcctgcctaacgctgcactgggattctggatgggcaggctgggccacgggccccacccaggacccggaaggagtggcacatctgggtcccggccaggggtgtgggcagcccggctccacctaccatttattgacaaactcctggaagtcgggggtgaacacaccgttgggcagcttaggaggtggctgtggaggagaacagagggtggggtcagccctgggcatcgtcagggaccctcggctgcagccctctctacccctcactgtcctgtccggtcacccaccctgcaggcctggccgacaccacatgccaactgggctgcaccctgtcagaggtggccttctcccgaaagctctcgtttgagagtcacggctgcttagagggaaagagtggggtgcgtcccccttttatcaacaggacaacctctcgagtgtcgtcacttgcttccttccccagtgtcactggctgaaggatgagctttgggactgggccccacagagggacatctggatccaaagttattttgttttgagacagtctcgctctgttgcccaggctggagtgcaatggcgtgatcttggctcactgcagcctccacctccggggttcaagggattctccagcctcagcctcctgagtagctgggatgacaggtgcccaccactgcgcctggctaatttttatatttttagtagagacggtatttcaccaggttggccaggctggtctcgaactcctgacctcaggtgatccacccactgtggcctcccaaagtgctggaattacacacctgagccaccgtgcccggccaaactgggtccacagttttaagcccaagcactggggagcctggcctgacacacgtccccggagcgggagtggccgtgtaagcggtgccagcagggcaggggcaggcctttcccgcgcaggggcaggggcgggaagaggcgggggagaggtcgggggatgtgctcactgggcatgggtgtggctgctaggtgcagggagagctgggtcaccagggccaccccacctggctccgtcatcatctcgccacccaaccccaggcctagcccagtctgcaggcagctcaaatgcccgtttctctgccccagctccaaagggccaccaaagacacagaaacccacagaaggcccagggaggtggcccggcctggtcacgtggccaacaggaccttggggtgcagtcctgtgcctccctgacagctgcaggcctggaaggaggccgcgtccctccttgtgccttgttttactcatctgggcggtggaaaccctcatactgtggctcactgggttgttatggggactgacggagcaggagccaccccgggacctacaggtccttctaggctctctgggcctccttccaagaggcaagggccattcctgtacctttctccgtggaagcggggtgatttatgagtccacgcccacgggcgccaggacgctctgatgcagagacactgggccactgctcaaggggcaggctggctcctcggcctgagcccagggctgctggcacacacctccctctggactcagggtgagaggctgcggtgggaattctgggttcgtcttcataaaaaaacaatgcccttgggaaggagctgggcttgtgcagcacagtagaagatgggagacgcgacacacgtggaattggttcaagaattgcttgaacctgggaggcggaggttgcagtgagctgagatcaagccactgcactacaaagctagacaatgtctcaaaaaaaaaaaaaaaaattagctgggtgtggtggtgcgcacctgtaatcccagctactcgggaggctgaggcacgagaatcacatgagcttggaaagtggaggtttcagtgagccgagaaggcaccactgtactccagccttggtgactcttgctctggtcagagagagactctgcctaaaaaaaaaaaaaaaaaaaaaaagaaagaagaaagaaaaggaaaagaaaagccaaaaggcatcaagcacaaacctcgttcacaatatagtccaggagttcaaagatggccatggcaggccggctatccatcccgtgacctgcacagggagagagatggaggtgagatgggccgatggccacctcacttctgctgggggttgggctcccagggggctgatcaccaccaggcgccctcctccacatgccagcctaaattggaggcgggtgtgcagaggcactggacaaagctcccctgcctgactctgggttccattccctgggacagctactccttgcctgagcctctagtgaattaaaaaaaaggcaaaaggaacaagaacattttttgagaagtcacacatttggctcggtgaggcttgccggacgtgccaaagtcatcacccctcctctctggagggcagggggagggacggtgctgaccgcaggcaaggacagccgcgtgaccttgcatggagctgctggcggtgatgggggcaggccccaagtgccactcaggacgggagactggctaggggtggctgacccctgtctgagaaccagctggccaggcctgggcttggcagctggactttcgccttctgcccgtcctgaaatgggcaggtgggctggggccctgggctggggatggtataccacctgagagttgggactgggagaggctgaggctaggcctgaggataaggacttgggggcctctccctgggatgagatcaagacatcccagcagtctggctggagaggaggaggtgggcttgccagtgctatgaaaatctccttctcacagccccaatccatccgggtaggaccacaaaacgtggcctgttcgtgtcataaaatactactcagcctttcaaaaggacccaggctctgacacgcaccatggcgtggatgacccttgaggacactgcgctccaggagagaagccacacacaaaacacagaaggccacacaagtgtgtgaccccatttctgtgaaatgcccaggacaggccagtccagaggcaggaaggggatggagagtgacagctgatggggacagggtttcctcttggggagctgagaaggttctggaattagaggtgatggggcgcagcactgtgactgaaaaccactgaactgctcacctgaaatgagttgtggggtgtgtgctttgtagttcggaaacatggttttaaaaccaaccacagtccgctacagggtcctttggggtctgacgccaccaactctccctgatgtctgactttaaaaaaaatcacaggaccctcctgtgattctgcaccaagcagggtccgcccccggctcttccctcaggcggtggaagtgtccgctcggccctctctgactggcgtcagggagctcccgctcccgaggtgcccgccctaagtgccggattgtcctctgcgagcccagctgtccctggggcctgagccctcccgccccctcccgggctgtgtcccctcctgtgtgtgttggggccggagccaacaggccactgagggccatgccaagtccaatctccacttcaggactccctggaaggcttggcccgcagcacaggagcgtgtcacctgcagaatgcaggctctgtggcggccaattccttccacttttctgtgcgtttgaatgctttcgggataaaatgttggaaaatccaactgcccaggggcttggtggcaaagctgcgctcccagatccctccagctggcaacaacaggtgcagctgccccggacagaacaggtttggggtgctcactgcttccagctctgtccccggaaaccccaggaccatgggaggactgctgaccacagtcggcaccatccagggggacaggtggtgcgccaggggcagaggggaggcagctgctgaccctggcacagcaggccccgcgcagggcactgcgcgtccagaccggaagttgcagattcaggccgtaccgctgacggggcgcccggggggcctcggccgaggcgagatgctgtgaggctctccttcttccccgtcgaccacgggccggccaaagatggcctccagctctttggcgtcgggcggggggatggggtaccttccgacggccagctccaccagggacaggcccatgctccagatgtccgactgcaccgagtaatgtgtgccctgcaaccgctccggctgcagcagagccagggaggaaagagcccagaggggcgaggatggcagctggaacccgggaggcttgccccgttacagcccccgtcaccctctccatggctaatgaccgcagcaatggatagagagctgttacgcaattctacctcccggctcacccacccagggcctccctgcggcacttgctgaagaggcttccagcccgaggcctggagctggtgttgaccgcagctcttgaagagcctgcaatgctcagcacttttgggaatggatgatgggccccaggaagcaggggcctcctcctccacagctaacatctcagaggctgctccaaggctcaatttggcaggttgctgaatccccagtcgtttcctgaaagaccccagattccaattccttggtccagaaattaactaagggccgggtgcagtggcccatgcctgtaatcccagcactttgggaggttgaggtggaagcccaggagttaagactaggctagccaatatggcgagaccccatctctactaaaaacatttttttaaaagttagccaaggctgccgggcacggtggctcacgcctgtaatcccagcactttgggaggccgaggcgggcggatcacaaggtcagattgagaccatcctggctgacatggtgaaaccctgtctctactaaaaacacaaaaaattagccgggcgtggtggcgagcgcctgtagtcccagctactcgggaggctgaggcaggagaatggtgtgaatccgggaggcggagcttgcagtgagcggagatggcgccactgcactccagcctgggtgagagtgtgagactgtgtctcaaaaaacaacaacaacaacaaaaacaaaaaccaaattacccagctgtggtggcacatgcctgtagccccagctgcttggaaggctgaggcaggagaattgctcccgggtgggaggcggaggttgcaatgagccaagattgtgccattgcactccagcctgggtgacagagcaagactctgtctcaaaaaaaaaaaaaaaaaaaaaaaaaagaaagaaacctggtaggcactgctagagacaaaaacctaagagagaattccaacaggaaggggagatctggccgggcgtggtggctcaggctcactgctagtggaatcccagcactttgggaggctgaggaaagaaggtcacttgagtccaggagttcatgagcagcctgggcaatacagcgagaccccgtgtctacaaaagattagtaaattaacaaataaaaaataaagagcaaggggaatccgaaaagcaggctcccaggaggcaccagctttagacgtgccttgtggcaagtggggagagctgatgaaggggagggtgcagctggggtgggactgtcccgggggtgctaacagccatgtaggagtgtgtgcccacgaaatagttgggaaagcctcgtgggaggcggggagagctgcgcaggagaactgggagggacagctgcgcaggagacatgggggtgagagctgagggggagagctggctggcagagctgggtggggagagcttgggggagagcagcagggaggagagctggaggggagagccagcggggactcacagccatgtaggagcgcgtgcccacgaaggagttggccatggagtcgatgagctggccgctcaccccgaagtcacacagcttgatctcccctctagagttcacgaggatgttggagggcttcacatctggaggcggcaggctgcgggtgaggggcgcccaacagttgcctgccggcccccggggctctggggagggcgggctgggccttacctcggtgcatgatctggtgcttctctcggaggtacgccaagccccggagaacctgcaggggagcgcggagggagtcacgggacaaggccaccagggcttagctcctgaccgagcccgggggtcagagctgagcagtcagagctggagcgagggagctgcggcaggaaccatttcaggctgtgaggagctcgctggggtggagcaagcgaggccagagacgagacagtgctgacagccctgtgctggcgtgtgcaagtcaaccccggttcccatggccgcagtgccgccgatgccactactgcctttgattcagagcacacggcttagccccagggaagctgagatggtggcccatggcccgggagtaggctgggctgccgagtttgcccacatcagcctgaaaggcagcatctggggtcccagggactgtgctaagggcccccagatgggacgggctaagggtgcctgggaaggacgatgtttcccccaggcccgccctggaagcagcatcccgagaagtgaagcaagcagcacaggcagtgtgacggcagctttcaactcggaaacgcgtgtctggcagcatgcgtcctgtgtcttaatccaacactggtatgggcaggcgggactcggcccctgctatggacaaggtgcaagctccaagaagcaacacgcacggtctgctgaaaccacacggctctacggagcagctgtgctggagaccgggcagcagagacgcccttggccccggtgacatttctaacagcaatggtgagtgtgtctggaggtcctggcgtcccacatcccaccccagagtctccctttcaacaagctcctgtcccctgcaacgtgccagctgccaacatccccctgccacgaggggcagaggggaccagtgtggcaaacagaggatactaagagtgaagagggacctataacgtcttcacttggcagatggtgacctcaggccccaaaagggacgtcacttgttcaagctccacagcaggtgggcacagccttggccactctctttctgcaggggccaccctaacccccaccacactgtgagtggctcccggaaccctggccgtgtggaagaggtccgtgcagagtgcggtgggggcgcgatgtgggtctgcggtggactcaccgcgatgctgactttccccaggatctcctcgggaatcctcttggcctctttcagcacctggtccagggagccgccgtcctagagggcacacaaggagtgagtgcaggctctgcgcaggtggccgggaagccacggatgcgtccccccactcccggcgagggggtggtctgcctcctgacgggaagcaggggccggagcccaactccacccacgggccaagggcagggcgtcttctgacagttctgcctttgggtctgaacacccacccacaaggtggggaaggaacagggcccagggttcccccgcctcccgtcccatcctcgaatcagttgcgtgactcggccctcctgaggtcgccacggcagaggctctgctccgggccagcccaagccgcggccgggggctcaggcagctgtggggcccgcactccctgcagcctacgtggtgggcttgtctgtgcgccacgggaggcggccaggctggagaccagcgtcttgggcctgcgtcctcttcccagcacacgaagggaaggggagggtgagggcgcggaggagacgcgggtgctgccccgcgtgggaggaggcggcgggtcgctgtgtgcccgtccagacccccagggggctccctcgccaagccctgcggctccactgctgggcgtctgccctgcgcctgtccctgccacctagggcagaaaggccaggccgagtaggaccaggggccagggggtgcatggactgcaggagggatcccagtgacgccagcccaggtgacggtaacctcggcccctccccacagcctgtggtctcctcgccactgtgccgggcatcctgcggagggcctggaaacgagtcatcatgggtaggctggtccccgggtgtggccccacatccatgtcataaatgatgaaacagaaattccatgtcttgcccaaggctgcctggcaacaaacctggggaccaaaacccccaaatgccaaaaccccaggcactgggagccacccaaggtgcctcttcagaggcagaggctccggacacacctgccaggccacccccaggacagcaggggtgacaggccaagttcccactgccaccgtctggcgtgcgtctcttctgtgctcagcagagaggaaagtggaactgaggctagagagggcgggctggaggagcctggagaggctggctggggagcctggatttccccaccatgctgctccaggactcctgcaaaagcccagccttccctgggatggctttcattcacatgggtgggaggagccgggggagaaatcctgggactcaggggtgcccgggttgccgctctctggccacttctgcccagctaggcttggagagaaaggccgaaggcagttctagaaaacccaacacgctttgagacctctaaagcatacacgtgactccatccaccagctccaggctgaagacgcagacacacagggtgagagggcaggtatggccagggctcagacagcccaggaggaggtgccaggacgggagctccagtgagccagggccaggtggaagctgcttctattctcagtttttatcaatctaccttaaaagaattacttaaaatgaggccggacatgggctgggagcggtgactcacgcctgtaatgccaggactttgggaggctgaggcaggcggatcacttgaggtcaggagtttgagaccagcctggccaatatggtaaaaccccatctccactaaaaataaaaaaaattagctgggcgtggtggtggatgcctgtaatctcagctactcgggaggctgaggcaggaagatcacttgaacctgggaggcagaggttgctgtgagtcgagatcgtgccacttctctctcgcctgggcgagagagcaagactcctcaattaaaaaaaaaaaaaaaaaaagccgcacgtggtggcgcacacctataatcctaccactttgggaggccaaagcaaaaagaatgcttgagctgaggagtttgagaccatcccgagccacacagtgagaccccataccaaaatcagccgggcgtggtggtgcacgcctgtagtcccagctactcagaaggctgaggtgggaggatcccttgaacctgggaggtcaaggttgcagtgagccgagatcacaccactgcactccagcctgggtgacagagcaagaccctgtctcaaaaaaacaaaaaccagaaagagaccaacgactcgaaagaggcagggtggcgaaaaccaaacagacgcaccaaacgcaaccctaaaacccctgctccccagcacagctccttccgtcttcgtttctcctggggccgcaatcaatgtttgtttagtgagaaaattcaaagagcctctccccggagatgagggcgggcggagcgctgtgctgcagcctcaggagctggtggaagacgcctcacaggagcatcgctctctctgcagccgcctttctccactgtgacatcggggccaggtcactctctggggtggggccgacctgggcactgcagggcgctgagtagcgtccctggcctccatccactccacgccaggagcatcccccagttgtgacaaccacacacatccccagacagtgccaggtgtctcctgggagggagaactgcccctggttgagaagggctgatctccagctataaagaccaaagtctggcagggtaagcaatttgtctgagtcacagagacaggatgtggtgcagggggtattgcagctgtgtactgctgaccccaaatctcactctgtgcatgaccatacacgtctaccgtgtgtgtgtgtgtgtgtgtgtgtgtgtgtgtgtgtgtgtgtgtgtgtgatgtttaaaatggtcttgtaactgtaattttgttacgtaggtagtaggtgaacacatttttctttctttttttttttttcctgaggcggagtctcgctctgttgcccaggcgggggtgcagtggcaccatctcggctcactgcaagctccgcctcccgggttcacgccattctcctgcctcagcctcctgagtagctgggactacaggtgcccgccaccacactcggctaattttttgtatttttagtagagatggggtttcactactggtgttagccaggatggtctcgatctcctgacctcgtgatccgcccgcctcggcctcccaaagtgctgggattacaggcttgagccaccgcacccggcaaacacatttttcttataaaaaattcaaatgaggataaataacctggacgccgcatcacttccaccattcccccctcaagtgtgacttatattgttccagatctttcttcatctctctctttctttctttcaggcaggggtcgcccagactgcagcatagtgctgtgatcttggctcactgcagcctccacctccttggttcaggcagtcctcccacctcagcttcccaagtagctgggagtacaggcgcgccaccatgtcctgctaattttttgtagagacgggggttcctcatgttgcccaggctgctctcgaagtcctggctgaagaggtcctcccacttcagcctcccaaagtgctgggatcacaggagtgagcacctggcccccgcatcttgctgtgtatttggaaacacagactcgggactcactctcttgcccaggctgtagagcagtggctcaatcatagctcactgcagcctcgacctactgggctcatgggattctcccaaagcactgggattaaagcatgcttgcccagccagagtttaaaacaacatcgaaatgggctcatgtctgtaatcccagcactttgggaggccgaggcaggagggtcacttgtggccaggagttcaagaccagtctgggcaatatggagagaccctatctctacacaaataagcaaataaattagctgtgcatggtggctcacgcctgtggtctcaactactcgggaggctgacgtgggaggacagcaccagtacactccaggctggacaactgagcaagaccctgacttgaaaatacaataaacaaatgaatgggccaatgctatgtttattttatttttcttttattttgaaatggagtcttgctgtcgccaggctggagtgcagtggcatgatctcggctcactgcaacctccgcctcccgggtgcatgtgattctcctgcctcagcctcctgaggagctgggactacaggcgtgcgccaccatgcccagctaattttgtatttttagtatagatggggtttcaccatgttggccaggatggtcttgaactcttgacctcgtgatccgcctgccttggcctcccaaagtgctaggattacaaacgtgagccactgcacccagcccatgctatgtttattttctacaaccacccctccactacatgaatagtgttgtactgtggggatactcccattcagtacaccattgtggatttcactttgccactgcaaagcagccaaatatcattctttaatcactcccttactgatggacatgtccagtttccattacagtagaacaagacgggcattcttcagcagataggacgagacccccagaaaggccaaggggcacctctacgaggtccgtaagccactggctctcctttccccatcccatgaggccccactgtccactgggttcttgccccgagttatccagtaataggttcagaccccagggaagcagccagccccactgttcctaagttccagtcaccaacaagtgcttgccattttatataaatacatcactgggcacggtggctcacccctgtaatcccagcactttgggaggctgaggcgggagaatcgtttgagcccaggagttcaagattagcctgggaaacatagtgccatcccatatctacaaaaaaacttgccgggcgcggtggctcacgcctgtaatcccagcacttttgggaggcagaggcaggcggatcacgaggtcaggagatcgagaccatcctggctaacacagcgaaaccccgtctctactaaaaatacaaaaaattagccggctgtggtggcgggcgcctgtagtcccagctactcgggaggctgaggcgggagaatggcgtgaacctgggaggtggagcttgcagtgagccaagattgtgccactgcactccagcctgggcgacagagctagactccgtctcaaaaaaaaaaaaaaaaaaaaaaacaaacttaaaaagctactcaagcgtgctggtgcacctgtagtcccggctacctggaaggttgaggcaggaggatcgtttgagcccaagaggtggaggctgcagtgagctaggatcatgccactgcactccaacctgggtgacagagagagaccttgtaccccctaccccccacaaaaaaagaaggaaaaaaatgcaaaataaagatgacatagaaatatgaggaaacagcgtagaaatacagggaaatggctgcagcagccaggacatggatgcaacacctgtgcgtgccgggtgccatcctgggaggagctcacacagtcctcaccccagcagggactacgacctccctcagcttcacagcagaagcggcaagagtcctgtcccgaacccgtggtaagggtgagcggtggggccgagacctgacccggacgcccatcctcagccccggtgctaagctgcccctttgcctcactggggtggcctgggagggaatgaatcaggtgctgggcaggcccttccatggaaacctatgggcactcaggtgaattccgagagcatcgttcagcatggagagaattcacagggccggcgaggatggcagggatggcccccttggatgactttacttccacggatgctgccctgtcagggctcacccaatgctttaaaaatcaacgtgctccacgttgtttttgtttgtttgtttgttttgagatggagtctcgctctgtggcccaggctggagtgcagtggcacgatctcagctcactgaaagctctgcctccagggttcacgccattcccctgcctcagcctcccaagtagctgggactacaggcacccgccaccatgcctggctaattttttttgtatttttttttttttttttagtagagacggggtttcaccacgttagccaagccagaatagtctcgatctcctgaactcgcctcggcctcccaaagtgctgggattacaggtgtgagccaccgcccctggctagaccacctcggaacttttaaagggtgcactccataacacagacagcacggcctgtgtctccctcctgcagcctggtggtctgtgtggtgtcccctggggtgccagcacccactctgggaacccccattttaaattcaccaagaatagaggttgggggcgggttgccacactgtcccctttctgcatgggaggaagggggctcgagaactgagtcagccacacaaaacgaggatggacagaactcctgagtagcgagggtgcctgccgggcgcgaggaggagggggaagacgaggaagacgaggaggaggaatagggagcaccacatgacagaggggctgcctcagaccacaaagcgcttcctcatcctttcctcgccctttgatgccgccggcaacgtgactctgcgagcagcggggcagacgccaggtctccctcgcaggcgggaaaggggctccaaggcgggtgctgccttgctcgggtcacatggctacgtgggggccttgctcaaattcacttcctgccttcattacaaaactgtcaaaggggatcgcacgtttgcagggtgtcacccaagcattctggttttgcaaacgacgctgtgcggcaggcggtctgatacctgatgagctcggtgtggcggggtcggcagcatttcctccggggttttgagctctggccacttctccttttgttccacccaatctcacccacttctgggcttcgaggccagagtgtcttaacaagggggcacgtcagagtcaatgaagggggtgcctgtaccccaccctagagactgtggtcccacagatctgagctgggggaggcacaggcctgccttgacaagctcagactgccacactttcctgagaaggccatttaaaaacagtcatcagctttgttatgttttgagacagcatctcgctctgctgcccgggctggagtgcagtggcgtgaccaaagctcactgtagcctcaacctcctgggctcaagtgatcttcccacctcagcctctcatgtagctggtgctatttttatccccatttttaaatgttgttaacaattttaaaacaggcacgtgccaccacactcacctaatattttaaattatagagatggtttctcactatgttgcccagcctggtatcgaactcctgggcttaaatgatcctcccacctcagcctcccaaaatggtaggattacaggcatgagccaccgtgcccggcctaatagggatcagtttttaattgcatctaccctggaacccagcaattccctcacacagcttacctcacaggtgtgcctgcgagtcagtgccatgttatttgagatagggcagagactggaaacaacctacgtaccccccaaaacgggagtgttttccctctctgctgtcataaggacgcccgggatacagcaagagaaaaagcaaagctgggaggaagacatgagtgcttaaaaaacaaaatcattggctgggcgcggtggctcacacctgtaatcccagcactttgggaagtcgaggcaggtggatcacctgaggtcaggagtttgagaccagcctggccaagatggtgaaaccctgtctctactaaaaatacaaaaattagccaggagtggtggcgggcgcctgtaatcccagctactcgggaggctgagtcagaagtatcacttgaatctgggaggtggaggttgcagtgagccgagattgtgccactactagattctagcctgagtgacagagtgagactgcctctcaaaaaaacaaaaagaaaacaaaacaaaaccaaaggcatctacatatacatacttgtatggcatcgactgccttgagaaggatcccctggaagccagcgcactgttgcctctgaggaaaggggccgtgagggggtcttccttctccccaacatgctctgttccgtggaggccctgcccctgcccctgccccggacgcactcaccatgtgttccatgcaaatgctgatctccccgtcactgtagaaggccccgtagaagcccacgatgtacggcgagttgcattcgtgcaggacctgcagctcgcggatgatctggttccggatggccggcttgatctcaaggtggatcagctgcaaggggagaggggcgagactggcttggggggtgcccgaaaacgggatgaaggcatttggggcctctgctctgcaggcgttcccaacagtggtcaagaccaactcagtaccccctccgcaattccacccctaggtgtctgcctagaagtggacacatacgtccacacagaaacgtgtcccaagtgctcacagcagcacgactcacagcaggcaagggtggaaagaacccaggcgtccacccagggcagaacaggccaacccagcgcagcccacccctcactgaaacaggactcagccgtaaagaggaaccaggccaagaccccggccacagcgtgggtgaaccctgaggatgtcatgcttagtgcgagatgccagacacaaaaggccacataatatgtgatcccatttctgtgaaatgtccaggacaggctgatccagagacaggaaggggatgtgtgggtgccgggggctggaggaggggatgggggtgactgctgatgtggacagggttctttttggggtgatggaatactgtaaaattgactgtggtgatgaggacgatgccgtgaatatcctacaatccactgagtcacatactttcaaaggggacactgtaaggtatgtgaattacacctcaataaacctgttttcaaaaaagaccaattaagcaaacacttaattcccactcagttgtagtgggagctgtgtgaaagcatttttccccatcaaatcagactttgacaaagtgcttgcctttcccaggagggaggcagggcaatggctcccctccaggcctctctccacttggggtgggtctatcccgagccccttcccaccctcaagctggagacaccccgtggagacgttagccacacagagccgcgggcgcccctgagaattctccctctccttcaacccaagttcaagacggcaggggaaattttcatcaagttgaccccggtgccactttaaaaaggcaagaagccaaagatccgctcaagagatgcagaaaggaggcctggtgtgtggctcacgcctgtaatcccgcactccgggaggctgaggtgggcggactgcttgaggtcaggagttcaagaccagccggaccaacatggtgaaaccccgtctctactaaaaatacaaatttagccgggtgtggtggcaggcgcctgtaatcccagctactcgggaggctgaggcaggagaatcacttgaacccaggaggcagaggttgcagtgagccgagatcgcaccattgcactccagcctgggggacaagagcgagactttgtctcaaaaaaacccccaaaaaaacaaaacaacaacaacaacaacaacaaaaacaccacgggcaacccctaaccccatggacaagccccagaagagccaggacccccagcatggcaaggagcagcctgaggctttgggacggcaccctggagaatcacagcatcccgctccagccactgcaataagacaagaaaaagacatggtttccactcatccgccacagaggcaaagccaggcccaggtgcagtcagtgaaggggcggccaagcacggagacagctccttcctggaggagacctggggtcaggacgggaacaggaatgggtaagaccacctcaatgtggcaaaaagtccaccaaggagaatcaacccaggtgcctggggagcagcaacaaggaggtgacactggggccgggccttgaggaaggacagagtcaccatgaggaggagatgggggagggtgttccaggcagagggacaaagagccgcctgtcagcgggcacggaggcatgaaggagccctcgctgtgttcagggcagcaggaggctgaccgtggccacagcacagggcgtgtgtggggagtggcccctgctctaggcctgtgaccttgagaagcatggcagggcccggggcacggtgcccacctccccccgcccggccgctcctcaggctaagcgtctcccaccttgaccgcagccctggcgctgcctgcccctgcctgcccgcccctgcctgcccctgtagcgctggcttctcccctcaggccagcctgcagaatccagctccagacggtggcccctgggctactccactccctcatggtgaccccacaggccccagggccaccccagcaccccaggatgctctcccctccagccaggctgtaactgagaggtgctggtgctcactcccgttgcacaagggcctggtactgaagcttggatgttcacgtggaggttgggagatttactggaaaaggccacatttgttttcacaccgagcccttgaagcttggtgcgtgttttccatgttcagcacgtccggactgaccgcattttaagagcccggtagccacatctgaacgggggctgctgtcttggacggctcagttcctgaccaaaaacttcaaaggagccacagatgggtgacaagaagcaggaaagagcgcgcgttcggctggccgtcgcaagtcgtaatttaggagaggaagtggcggatgggctactgggaggaatcccagaggccttggaacccaggagctccgaacgtgaaatgaggccgtcggaagcgagaggccttctggaaggctgtagtaaatagcagaggcgagggaggccagtctgcacagggcggctgcggcgtgatctcagttttaatggttctgtaatacctggggcctgtcgagcgagcattccagataaacgggcagccaccactgagggtgtgcaaggggaaaggcagacagacagacagatggacaggaggggagggggcgttcctgagcacctgcaccctctaaagttcaccctgacaagcccgggggatgggtgtactgccccactggtgctgactgagcaagctcaggttcggagcctcggagccatgttcccagtggcattagctgctaagtcaggactggggctgcctcggggaacactggagcccgtattctttccaggacaccacagcccaggccgtgccagctctaatagctgattaaatgtggatggtgtcagggtgttaaaactaaatgccagacctggctcggaggtggagacggttgctacagaagaatgaggaatttgagccaggggtggggttgggggattcggagtaggaaaagagaggaaagagcttcactgagtgtcagcgagagcaggaggggaagaggaggaccgagccgccccccggccgccaccccgcaggcctggaatgatctcagcaacctcgtaaatcatggatcagaaactgacagctcccaagctggatgtagccaagagtcacgtgcagcccacactgcgcttccaaacatcctgaattaggtgttgtcaaaaattggaagagagccggggcagtggctcacatctgtaattccagtgctttgggaggctgaggcgggaggatcgcttcaggccaggagttcaacactgggcagcgtagcaagccttcatctctacaagagattttaaaaattaacacacaggctgggagcggtggccagctaggggaccgcagtgcagtggatctggaggctcagccccggcagctgctcccaagtccgagcagatccaagagggttcgaatccgattcaggcactgaccccacacagcctcggtttcttcaactgtaaaacgaggctgctgttcaattttaatgagaacacgcgtcaaaggtgttggcagcggcttcgactcaggtcgtcacttgtgagacagcagctggtactgtgaggtggccttgggcaggccgtgtgaccgccaccctggaagtaagctacagcggagtggaggaactcagaggcgagaacaaacactctcatctctgctatgagcatggacaattcaaagaagccccacacgcgtaacaagcagcaagttcttcacctatctccctggcccaggtaacgcggggacgctgctccaatgggagaggggtcagaggccacggtcaagccaaaaagacatttacaaaccagcatgacctcaaataccgagactgggccaggcgcggtggctcacgcctgtaatcccagcaatctgggaggccaagatgcatggattccttgaggtcagatgtttgagaccagcctggccaacatggtgaaaccccgtctctactaaaaatacaaacattagccaggcatgccagccactcaggaggctaagggaggagaatcgcttgaacctgtgaggtggaggttgcagtgagccgagattgtgccactgcactccagtctgggtgacagagcgagactctgtctcaaaaaaataaataaataaaaataagtaaataaataagatgaaatgaaaggagcccttgcagccctacctgcatagcagccagagccgctgagcccacgagctcaatgcatcctctcccacccgagttttcgggcactttaaagaaaacctaattttgaaagaattatagaagcacaggaagttgcaaaaatagtaacgagagtcccgtgcgccctttccccgcctcccccaagatgactgacatcttacatgacggaaggacagtactgacacccagagctgatgctgggacatctccacccaccagaccacagaacctgcccagccacgcctgccctcaggttcaaaggccccgatctccctttccccgctacagtaaagctgcaggtgggcccggcttcacctgcgcctgtcagcaggagcaggagctgctgatacagcaagcattgggttcatgtccactgcccagcccatcagggaccactggaggctcccccagaagcctgagggtccctggcacacacgaggactggcactgtctcaaggccctgctgtggctgtgtgaaccacacgcttgcctttttccacccagtgcttcgggcggaggcggacctgagctttccaaggctgctccggtttggaagaggctgcctgcagtacggggacagaaatagcaagtccgcggctgcacacttcaggagggagggagggcagcactctagaggccagaagacagagctgcagagctaaatccccgcaggagttgagccgctgctcccgaggaaggcagggccctcaagcactgctgccacctgcgcagacccacgggactaggtgcagtcacgttcccccagtttggggaactacaggatggtgggcttccaggaagaggcagcgttctaggtctgaaagaacaccggtgaggagctgaacaccctgtcaacactaagtcccctacttctgtgtttaagagccactgtccccaagtggtcacatcctccctgtatcccctgggcactattctcaaacacagagcacagaggctgcatcatggcccaggagcccgggatgactaagcacgggggccgtcagcaccagggcttgcagactttcaaagggtgggtgacagtcagctttgtgtgtctcctcggtgagaccacggtgcccagttgtcaaacgccagtctagaggttgctgggaaggtatgtttttaagatgtgattaacctttaaattggcagactctgagcaaagcagattactccaccccagggtgggtgagtctcagccaatcagctgaaggccttcagggaaaagcctgcccaggcgcggtggctcatgcctgtaatcctagcactttgggaggccgaggcaagaggatcacttgaggtcaggagttcgagaccagcctggccaacacggtgaaccccatctctactaaaaaaacaaaaattaactgggtgtggtggcatgcacctgtaatcccagctactcgggaggctgaggcaggagaatcccttgaacccaggaggtagaggttgcagtgagccaagatcgcaccactgcactccagccaattccttagaataaatctctctctacacatacactcaagtatcattaaggacagggatacactgagaaatccctctctgggcgatgtcgtcactgtgcaaacactggaaagcccattccacacccaggctcccatgctctgtacagcgcagtgctgagctgctgtctgtttatttaaatatagagaaccgaggcaggcggatcacctggggtcaagagttccagaccagcctggccaacatggcgaaaccctgcctctactaaaaacacaaaaaaatgagctgggcctggtggtgtgtgcctgtaatcccagctactcgggaggctgaggcaagagaatccttgaacccaggaggcggaggttgaagtgagccaagatcatgccactgcactccagcctgggcaacagagcaagaccccgtctcaaaaagtaaaaataaaaataaaaataaacatacagaaggcacagcaaaaacatggcctgatcatcttacgtcgccaccgctgcgtaggcggtctgtcactggctgagccatcgccctgaggtggctgtacacataggcgcaaacacacacacgcttcgtcttcatcgcttgtttctctggagaaccataacacactcgcatttctgaaacccccacgtgctagctttctgggaatatggatttcaagtgccctccagggcagaaagtagtcactggagggcacagctgtgtgtggctggtgtggctggcacggctcccatctgcccagaagctgggccctttctcaggacctagagtccctggtggggatgagggacagagcctggagctaatcagaatgcagagacccggctgccttcccaacctgcctcctgtttccagggggaccttccccaccactccccgacctccccgaccccgcagtgctcaccttcctggccatgatgaggcccgagggtctgtgctggactttggtgaccaccccgccgttgcccgcgcccagctctgagatcctttcgaagtcatcgtctttgagttcgccgaccttggctttctgggtgagaaaggcttccagccgcttcttctgctgctcgtcaagttccagctcctccagcttcttctgcaggtccaccaggtttgccctgcagagaccccccagggtaggggttagctacctagggagactccatctggccgtttgctatgtggccgtggtgcatcggcccccaggaggacacagactggattcctgcacttgaggggttcatggtgtagaaggaaaggatccatgctgtgtacccccatagacacaccaatgaccagaatccagggcggctccccgggaactgaggacgctgccttgatcctgtctcaacaagtctagcagacctcaggacctcaaggataagctgcagctcaaaggacccaggaagcctccgtctttttcttttctttttcttttttttttgagacggagtctccctctgttgctcaggctggaatgcagtggcgcgatctcggctccctgcaaccttggcctcccgggttcaagagattctcctgcctcagcctcccaagtagctgagattacaggctcccgccaccatgcccggctaatttttgtattttcagtagagacagggtttcgccatgttggtcaggctggtctccaactcctgacattgagtgatccgcctgcctcagcctctcaaagtgctgggattataggcgtgagccattgcacgcggccgggagacctccttcctaacgcacgagctccggaccatgtcgggaggagacgaggaagctgggatcgggtgaacggagcccgggccaagatgtctgtctttgcaggagatagaggaacaagcgttctgagcagcctcagagcacagaatgagaaccaagagtagagggcagaaggctcagcacaaaagctgcatcaggtaggcacggtggtgcacgtttgcagtcccagctacttgggaggctgagacacgagaactgcttgaacccgggagggggagattgcagtgaactgagatcttgccactgcactccagcctgggcagcagagggaggctctgtctcaaaacaaaacaaaccaaaaaacaaaaaaaacaaaaaataagcatgaccagcctgggcaacaaagtgagacctatagccgagcacagtggctcatgcctgtagttctagttactcaggaggctgagcccaggaggtcgagactgcagtgagccatgatcgtgacaatgtactccagcctgggtgacagagcaagaccttgtttctacacaataaaaaatttctaacaatttaaacaagcaagtacattgcactttattgggtgattcaaggaatcttcagaggaaatttcgacagtaagctattttcacaaatgccttgactcagaaccagatcctggagtaacagacaactaagcgcaatgcacacaggaacccattgctgtgcacaagcaatggaatgtaaaccatgcgcacaaattaaaatcttctagtacccatgtttaaaaagaacaggtgaactcacttcatttatttagagacagggtcctgctctacctcccaagctggggtgcagcggcacgattacagctcactgcagcctccaactcctgtcctcaagtgatcctcccacctcagccttcctagtagctaggatcacaggtgtgagccatcatgtctggctctttttaattaattaatttttattattattattattttctgagacaaagtctcattctgtcgcccaggctggagtacagtggtgtgatcttggctcactgcaacctccacctcacgggttcaagcaattctcctgcctcagcctccgaagtagctggaattacaagcacccgccaccacgcccagctaatttttgtatttttagtagagacaaggtttcgccatgttggtcaggctgctcttgaattcctgggttcaagccacctgcccaccttggcctcccaaagtgctgggattacagacataagccactgcacctggctgaaattaattttaataacacatttgatttaacccatcaaaaatgttatcattttcaacgtacaaccagtatgaaaaatgaatgaatgtttcacactgtttccgtcttaagcctttgaaatctacaatggcattattgcgcctatgctctcgtgggtttgggcaattcttgttttatgtgttgcctgtagccaggggctactcaaccaggcagtgcagctttaaatggctctctggaagaacaggccacctccagaggtcccaattcaggaaggagctaaagccaaggtggacagccagagaggggactgaagcagggaatgaaggcgtggactgctccttccatctggaaatttccaatcccaaagttcgaccactgttcgcctacagctggaagtggcgtaagccacggggcacacaggccagaaccgaggcgatggcgctggagctggtgctgcaaagagctcgctggaaggcaggggcctgggcaccgcttcctgggctggacaaacaccatctcattccattctcaccatcgtccccggaggcccaggcaggagggaacagactcacaggggtgggggaacctgcccgaggtaacaacacctgcctgaggtcaggacaacccctgctcatcttagtgtcccccatgaggggaaacagggccctagtaggtgctcactgaggagctgctgaacaaggacccagaagaagcagaaatggcgagaccctgggagtgggacagaaggtaaggaggggaacatgaatgaatgaatgaataacatcaatgaataaatgaatatttattttttttgagacagtcttgctctgtcgcccaggctggagtgcactggcacgatctcagctcactgcaacctctgcctcctgggtccaagcgattctcctgcctcagcctcctgagtagctgggattacaggtgtgcatcaccgcgctcagctaatttttttggcatttttaatagagacggggttttgccatgttggccaggttggtcttgaactctgggcctcaagtaatccacccaccttggcctcccaaagggctgggattacaggcgtgagccaccacacccagccatgaatgaacacttctgatggcagacttggaaggtctcaagtactgctcaaaacattgaaaatgcattctggagtcagctgactaatccatcttaaatttactggcaacccaactgtggttattaaacaaaacaaaacaaaaccttggcgtccctacagccagcttcctctcctgggggaatccttcaagagatgggaatcaaaccccacacggaagagaaatgtgaagggcgagttctgtgcagagaatgaggaacgggtccccgtgtctggctgtgcccgtgttgacttgcacacattggcatcaagagtcttcatctgggtcacagaaggccgacccccaagcgggagaggccaccagacatgccacagtccctgacacctggttcttgaggggtcacaccgcaggcacggcacccggaccccagccaagggccccggggatcgccctgccctgcctcggcctgcagaacgggagtgcagagatcaccctggcatgaccccaccagtgtgtgcccccaacacccagtcccctccctcgtcctggagcagtgcgattctgccagcacgccacccggaccccagcatacccctttctcagatcccttcacccaggcctctggtcgccctccacctcctcaaagcttctgcactgggtcagcccctcacaagggttttccggtccactcacttcagaatctgcacctctgctttcaggggccagcagggtcccctgatccccacgcctcctcgttcctcacactctggcttccctgtctcctcacacttccagcttcagggactccacacactgggcaccgccacaagcaggagatgccctctcagagatgcccatcttgacatcttgacctccctgggaccccatcctgaccccctcagaaccccaacatgagacccctaggaccccctgctctgccctcccagaacccccacaacatgaccccccgaggaccccctaacctgacccccccagaatcccccaacatgacccccgaggacccaacctgaccccccccacaacatgaaccccctggaacccctgtcctgatcccactagacctcccccagcagaaacccctccatctggaacccgctagaactcccatcctgaccccgctaaagcccccccatgtcctgacacccctaagacacccccttgtcctcagataccccagaactcccaccctgacccccccaaagtcccccgatcctgacctttctagggtctcccaccccatcgtgaccccctaggacacccctctcccacatcctgacccttctgggagccccctgtcctcccctctcttcccttttccctggttgtctatggacctcctcaccccatcctctcccctaagggacccccctgccccaccttggcaccctaggtgccctcttcatcccatgccaacctcattactcagggactcattccccaaaaggaccgctccccgcccccccaagacctctcagcctgtcctccccacccaggtgctgcactctcaacctgtggctcaggcaccctcccaccccatctctcccccataggaaccctcccaccccatctctcccccatagggaccctcccaccccatctctcccccatagggaccctcccaccccatctctcccccatagggaccctcccaccccatctctcccccacagggaccccctcaccccatctctcccccatagggaccccctcaccccatctctcccccatagggaccctcccaccccatctctcccccatagggaccccctcaccccatctctcccccataggaaccctcccaccccatctttcccccatagggaccccctcaccccatctctcccccaagggactcgcttcactatcatttcaatatgcagaacaccccttgcctatccttcccccacaggcccccaccgacacatcctctcctcccagggaccccctcaaccccatctcacaattcaggggccctgcaccccatcttctctctgcaaggacatctccttggcctgatctcacgacttagggattccaaaccccatcttttccccaaagggatctcccctcactccaatctcattactcagggaccccaccatctccccgatttcactattcagggaccgttcaccccatttcactactcagagacctaccaccattctgctactcagtgactccatgccctgtcttttcccacagggacctcccttggccctatctcattattgagggacccttaccccgtcttttcctaccagggaccctaccccatctcagtctcattactcagggacccctcaccccatcctctcccctctggagcccccttgcccagatttcctcctcaggggctgcctgacctccccacaccccatcctctcctctcaggaatgccctgcaccccgatttccctactcagggtctcccctcaccctcatctcatgactacggcaacctttactccgtcctttcctcttaggaactcttcaccctcatttcactactcaaggaccccacactgtgttctctcctcttagagatacccctcaccccgatctcactgcttggggagcctcatcctgttctctccttggggacacccctcattccgattttcctactgagggactcccctcaccccagcttcacttttcagaagccccacaccccatcttctgcactgcagggacctcccctcactcaacctcgctgctcagggacccctgtccccatcctctcctcttagagacatccttcaccccaacttcactactcagagactcccgttatcccaattccactcttcaggaaccccacaccccatcttttccaccacaaggacctcccctcgcccaatctcactgctcaaagacccccctgccccgtgcacccttcgccccgtcctccgagggccccctgccccgtcctcccccgagggccccctgccccgtcctcccccgagggtcccctgccctgtcctcccctcgagaaccccctgccccgtgcaccactcaccccgtcctcccccgtgacccccctgcctcgtgcactcctcgcgaacccccgtcccctcgccccgtccttccccgagggctccctgccccgtgcaccccaagcctccggctgacccctgcccactcactcggaggcgccctcgctggtaggggatgggccctcggcgatggtagggttgatggtgagcgccggcagcaccggcttcctccgggccagcatcggggctccgcgggccggcggcggcggcgcctctagccggggcccatagggggcgggccgggagcggtcggcgcctacgcgagcccggggctgcggccgcggcccaggccggcgtcggggcggccgagggcgggcggcgctgcgggcctgggccgagggtagccgaggggcgctggggctgaggcgagcgagccgctaccgctgccgaggcccgaagaaggctgacgccgcagcccgagtccgagaggcagggggaggggaggggcggccacaagatcgcggaccggcttctcgcgataacgggatcgggagccgcgatggaccccacccccagccgccgcgcctgcgcagcagcacaaggccgcctttcggaggggaaaggggcggagaccgacgcgaggcggtgccgggaccgggcgccctcgcttgccttaccacggcgcgtgtgcccaagcgcttggggcatgaggcgcgggagcaggggaggagacggagggatgaaggctggggtgatggtcgtgcacaggtgggcagggtagccagactcctgagagcctgtggtgccccaggctggggctgagagaacccgtaagaccccagaacagtggacgagacccacccagagtccatttaatctttttggcaagcgtggacacacgcccctagcccccaccgccttagagtgtcagttactccccctccttcatcagaacaaggccactctaaaacatttttaaaatttattttaattgacaaataaaattgcatatattactatgcgcatgttgaaacatttttattataaaatacacataacataaaacttgtcattttaaccatttctaaatgcacagctcagcggcattaagcaaccaccaccaccaccatctccagaattttctcatcttccgaaactgaaacactgtcccctatgaaacctcactccctatccccctccccagcccctggaacccaacgtcgtacttcctgtgaatctgatgattctagggacttcatatgagtaggatcacacaggttttgtccctttgtggctggcatatttcactgagggccacgtcctcaaggtgcctgttgtagctgtgttagatccacgttgtaacctgtgttagaatttacccacttgactactccgggcatacttccaatcgggtagccctgctccaaaaaagagcagaaaaaaaaaaaaaaagaaaaatttccctttttttttttttgagacggagtctcgctctgtcacccaggctggagtgcagtggtgcgatctcggcccactgcaaactctgcctcccgggttcacgccattctcctgcctcagcctcccgagtagctgggactacaggtgcccaccaccatgcccggctaatttttttgtatttttagtagagacggggtttcaccgtgttagccaggatggtctccatctcctgacctcgtgatccacccgcctcgatctcccaaagtgctgggattacaggcgtgagccaccgcacccagtcaggattttcctcctttttaaggctgaataatattctattgtgtgcatggactatattttgcttatccatttatctgccactagacacttcggtgaatcgtgccgctatgaacacagatgtacaaatatctgtttgagtccttgccttgagttcttttgggtatatgttctgaagaggaattactggattatatggtaattctatgttgaactttttgaagcaccaccttactatttaatacaatagccgtaccactttataagaaaggtcataggctgggcgcggtggctcacgcctgtaatcccagcactttgggaggtcgaggcgggtggatcacctgaggtcaggagttgaagacgagtctggccaacatggtgaaaccccgtctctactaaaacaaaaaaatacaaaaattagccgggcatggtggcgcgtgcctgtaatcccagctactcgcgaggttgaggcagaagaattgcttgaacccgggaggcagaggttgcagtgagccaagatcacgccattgcactccagcttgggagacaagagcgagacttcgtctcaaaaaaatcaaacaaacaaacaaacaaacaaataaataaataaaatacaaaaattagccaggcctggcggtgtgtgcctatagtctcagctactcaggcggctgaggcaggagaatcgcttgaacccggggggcagacgttgcagtgagccaagattgcaccactgccctccagcctgggcgacaaagtaagactccgtctccaataaaacagaacaaaaaaaaatttaattttttgccaggtgccgtggctcacacctgtaatcccaggaccctgggaagctgaggtgggctgatcacttgaggtcaggagttcgagaccaacctggccaacatggtgaaacctcgtctctactaaaaatacaaaaattacacaggtgtggtggcgggtggctgtaattccagctactagggaggctgaggtgggataactgaaccccggaggcggaggttgcagtgagccgagattgtgccatcgcattccagcctgggcgacagagccagactcacgctcaaaaaacaaaaccaaccaactggccgggcgcggtggctcacgcctgtaatcccagcactttgggaagccaaggcaggtggatcatgaggtcaagagattgagactatcctggccaacatggtgaaaccccgtctctactaaaaatacaaaaattaactgggtgtggtgatgcgtgcctgtagtcccagctactcgggaggctgaggcaggagaatcgcttaaacccgggaggtggaggttgcagtgagccgagatcacgccattgcactccagcctgggcgaccgaccgagactccatctcgaaaaaaacaaaacaaaacaaaacaacaaacaaaacactgctcctggggaagcctgctcctgggtttttacaatctgggcctttcagttttacttctcatcgctcccacccgcttgtccaaaattcagatggatgcatatgtggcctcaaataaggacaggccctttcagagacagggctatttccatgttccttctgttttgcctagcaatctttctcccattttatcctattttaggctttttttttctttttaagacaagttctgactctgtcacccaggcctcaggctggagtgcagtggcacgatcataactctctgcagcctccacctccctggctcaagcgattctcccacctcagcctccctagtagccctggctacaaacatacgccaccacactcggctaatttttgtattttttgtccagacagggtttctccatgtcactcaggctggtctcacactcctaggctcaagcgatcctcctgcctcgtcctcagcagtgctgggactagagccgtgagccactgcactcacctattaatgcacaagtttctgaagttcaatttcttggattattacaactctatacatccatgtaacacttccccttactccagaaagtctgttcactgcctttttagttcattctcttcctctgcacccagcagtagtgagctggtaaatgtttaacaatgagccattaaaataaggagaggccgggtgtggtggctcacacctgcaatcccagcactttgggaggccaaagcaggtgatcacttgaggtcaggagttcgagtccagcctggccaacatggtgaaaccccatctctactaaatatacaaaaattaggctggtcacgggtgtaatcacagcactttggcaagccgaggtgggcagatcacctgaggtcaagagttcaagaccagcctgaccaacatggtgaaaccccgtctctactaaaaacacacaaaaattagccgggcatggtggtgggcacctgtaatcccagctactcgggaggctgaggcaggagaactgcttgaaccccggaggtggaggttgcagtgagccaagattgtgcccctgcactccagcctgggcaacagagtaaggctccatctcggaaaaaaaaaaaaaattagctgggcatggtggcaggtgcctgtagtctcagctacttgggaggctgaggcacgagaattacttgaacctgagaggtggaggttgcagtgagccaagatcgtgccaccgcactccagcctgagggagactctgtctcaaaaaaaaaaaaaaaaagaagaagaccagatgtggtggctcatgcctataatccctgcactttgggaggccgaggcgggtggatcacctgaggtcgggagttcgataccagcctgaccaacatggacaaaccctgtctctactaaaaatacaaggccgggcgcggtggctcacgcctgtaatcccagcactttgggaggctgaggcaggcagatcacgaggtcaggagatcgagaccagagaccatcctggctaacacagtgaaaccctgtctctactaaaaatacaaaaaaattagccaggcgtggtggcgggcacctgtagttccagctactcaggaggctgaggcaggagaatggtgtgaacccgggaggtggagcttgcagtgagctgagatttcgccactgcactccagcctgggcaagagagcaagactctgtctaaaaaaataaataaataaaaataaaaatacaaaactagccaggtgtggtggcacatgcctgtaatcccagctacgagggaggctgaggcaggagaatcgcttgaacccaggaggtggaggttgtggtgagccgagatggtgccactgtactccagcctgggcaacgagagtgaaagtcagtctcaaaaaaaataaagttgacaatggtatcaaagatgcttacgagtggctgtaagccagctgcagtccactactactcccaaaacccccccagattctgcgttctatccccatagattagtttttgcctgttcaagagtttcatgtaaatggaattgcactcatggtgtcagttctttttttttttttttttttttgagacagagtctcactctgtcacccaggctggagtgcagtggcacgatctcggctcactgcaacttccacctccgaggttcaagcgattcccgtgcctcagcctccggagtagctgggattataggcgtgtgctaccacacccagctaatttttgtatttttagtagagatggggtttcaccatattggccaggctggtcttgaactcctgatctcgtgatccacctgcctcggcctcccagagtgctggaattataggctgggattacaggcgtgagccaccgcacccggcctggtgtcagctctttctgctttaggacaatgttttgtttttggttttggttttgttttagacaggattttcctttattgcacaggctggagtgtagtggtgtgatctcagctcactacagcctccactttctgggctcaagccatcctcccacctcagcctccggagtagctgggactacaggctcccaccgccatgcccaactaattttatattttttgtggagatgggggggtctcatcatgttgcccatgctggtctcaaactcctaggctcaaatgaccccagtgacttggcctcccaaagtgctgggattacaggcgtcagtcactgtaccaggtcctgagacaatatttttgagattcatttatattatttcacataacgataattagttcggtttccttgctagatgatatcccattgtatgtactgtgggcattgcccttgacatagaacagtaaatgaatcatccttctggccgggcgcggtggctcacgcctctaatcccagcactttgggaagccgaggcgggtggatcacgaggtcaggagatcaagaccatcctgactaacatggtgaaaccccgtctctactaaaaatacaaaaaaaattagcagggcgtgggggcaggcgcctgtagtcccagctacttgggaggctgaggcaggagaatgccgtgaacccaggaggcggagcttgcagtgagccgagatcgcgccactgcactccagcctgggtgattgagcaagacggtctgtctcaataagtaagtaagtaaataaataaatatataaattctccttcttttttttggagacgatctcactctgttacccaggctggagtgcagtggtgtaatcactgctcactgcagcctctacctcccgggatcaggtgatcctcctgcctcagcctcctgagtagccgggatgacaggtgcacaccaccatgcccagctaattttttattttttgtagaaatgggcaaggggagtctcaccatcttacccaggctggtctcaaacccatgggctcaagcgatcctcctgcctcagcctcccaaagtgctgggattacaagtgtgagccaccaagcccagcctgttatgaactttttttttttttttgacagggagtcttgctctgtcacctgggctggagtgcagtggcgcaatctcggctcactgcaacctccgcctcctgggttcaagcgattctcctgcctcagcctcctgagtagctgggattacaggtgcgcgtgccaccacccccggctaatttttgtattttttgtagagatggggtttcactgttttggtcaggctggtctcgaacccttgacctcgtgacctgcctgcctcagcctcccaaagtgctgggattacaggcgtgagccactgtgccgggtctgttatgaattttttgaggccaaagaagatgttggatgtatctccttctctcccactttacctccccggacataatggatgctggatacatatgtgttacttgaaggaatgtcctgggtgttcttgttctcaaggagacaggttgccttattacaaggcaaccattcgcagcacttatgataaaacaggagctttaattgctgaggttacagtgcagcctcaccccctccacccattctctatctttactaccaagcatagtttgccctgtgacctctctctgtgatatattttctacttatcattgcttccaataacactttttctgagtacatctgtctcttggtcccagagacgtgggtgtctcctaaattgctcctcccaggaaataaatttctaatagctttcttgatagattcaatccaaggtgacatttatcttgtagaggcatatgctggtgttaatatcacatgtgtacattgtttccaactagcaatgtcctgtgaactttatctctgtcacctgtgcaatggattaactgacagaacagcgaactgaaccctttggaaagcaatttaaccctatcgtgagcgcgctgtgactcagcagttgggatcgtgggcatgtgacttagagagactcttgcctgtgtgcaaacgggagactcacacaataatgttctcaatggcaaaaatttggaaagtacacagagtccattgatgggagaatggaaaaatacgtcctagtgcagtcccacagagaaatatgatacagcagaaaattcctaagtgacaacagcataaaagaatcttagttagtctcagctacttggaaggctgaggcttgaggattatttgagcccaggggttccaggaagacctgggcaacatagggagaccccccttctctaaagaaaagaaaaaggcgggctgggcgcggtggctcacgcctgtaatcccaagactttgggaggctgagatgggcggatcaccaggtcaggagattgagaccattctggctaacacagtgaaaccccgtctctactgaaaaaataaaataaaataaaataaaataataaaaaaattagtcgtgggtggtggtgggcgcctgtagtcccagctactcaggaggctgaggcaggagaatggcatgaacccaggaggcggagcttgcagtgagccaagatcacgccactgcactccagcctgggtgacagagcgagactccgtctcaagaaaaaaaaaaaaaaaagaaagaaagaaaaaggctggatgtggtagctcacgcctctaattctagcactttgggagggcgaggcaggcagatcgcctgaggtcaagagttcgtgacaagcctgggcaacatggtaaaaccctgtctctactaaaaatacaaaaattagccaggtgtggtgatgcacatttgcagtcccagctactcagaaggctgaggcaggagaattgcttaaactggggaggcggaggttgcagtgagccaagatagcaccactccagcctgggagacacagtgagactcaatttaaaaaaaaaagaaaaagaaaggttataaaagactataatgccatttttattttttaattaattttttttaaagagacagagtcttgctgtgttggccagtataagcttgacctccaagcctcaagccatcctcccaccgggaccttccagaatgctgggattacaggcatgagccaccccacctggccttatgacaaccttttttttttaaattaatttatttatttttgagatggagtcttgctcttttgcccaggctggagtgcagtggtgcaatctcggctcactgcaacctccgcctcctgggttcaagcgattctcatgcctcagcctcctgagtagctgggattacaggcatgtgccaccacgcccagctaatgtttttgtatttttagtagagatggggtttcaccatgttggccagactggtcttgaactcctggcctcaagtgatctgcccgcctcggcctccaaaagggctgggattacaagtgtaatcaagtgagccaccacgcctggccttatgacaccatttttataaaatgaaaatggctcagtgttattagccattagagaaatgcaaattaaaaccatgatgagatacttccatacgcctattagaatggctaaaataaaaatactgaccaggcatagtagctcttgcctataatcccaacactatggtaggctgaggcgggaagatggcttgaggtcaggagttccagaccagcctgggcaacatagtgagatccttgtttctatgaaaacaaacaaaaaaaaacttagctaggtgcacacctgtagtcccagctacttgggaggctgaggtgagaggatcgcttaggcccaggaattcaaggctgcaatgagctatgatagtgccactgcactccagcctgggtgacagagcaagaccctgtctcaaaaggcaaaagaggctgtgtgaggtggctcacgcctgtaatcccagcactttgggaggctgaggtgggtggatcacctgaggtcaggagttcgagaccagcctggccaacatggtgaaaccccatctctaccaaaaatacaaaattagccaggtgtggtgccaaacgcccgcaatcagagctactcgggaggctgagacaggaaaatctcttgaacccagtaggcagaggttgcagtgagccgagattgtgccactgcaccccagcctggacgacaagaacaaaactccgtctcaaaaacaaaaacaaaatttggccgggcacagtggcttgcacctgtaatcccaacattttgggagcacaagtaggcagatcgcttgagctcgggagttggagaccagcctgggcaacatggcaaaaccccgtctcagccgggcgcggtggctcacgcctgtaatcccaacagtttgggaggccaaggagggtggatcacaaggtcaggaaatcgagcccatcctggctaacacggtgaaaccccgtctctactaaaaatacaaaaaattagccgggcgtggtggcgggcgcctgtagtcccagctacttgggaggctgaggcaggagaatggcatgaccccaggaggtggaggttgcagtgagccgagatcgcgccactacactccagcctgggtgacagagtgagactccatctcaaaaaacaacaacaacaacaaaaacccgtctctagaaaaaaaaaattatttgtgtgtggtggtgcatgcctgttgtctcagctactcaggaggctgaggcaggaggatcacttaagcctgtgaggtcaaggctgcagagagctataatgacaccactgtactccagcctgagcaggagagcaaaaccctatctcaaagagaaaaaacaaaaacaaaaaaaaaccagcaacgaaaagattaagatggtaaattttttgatatacatgtatttaccacaattttaaaaagattagggctgggcgcggtggctcacgcctgtaattctaccactttgggaggccgaggtgggggaatcacgaggtcgggagttcaagaccagcctggccaatacggtgaatccccatctctactaaaaatacaaaaactagctaggcatggtggctcatgcctgtagttccagacactcgagaggcagaggcaggagaatcgcttgaactcaggaggcggaggttgcagtcagccaagattgcgccactgcgctccagcctgggcaatagagattccgtctcaaaaaaaaaaaaagaaaaaagaaaagaaagattatacataaattatagaaaaggaaaagtgcaccttataacgtttagggatatgaacacatgattaattgaatttcgtgaagtctgtgagttcctggaatgccgggaactcatccatcttggcatccctggctgccagcaccaagcctgacacacgggaggtgtttggtgagcacagatgtgagcaatgaatgtggctgccttggggacctcgtggcatggtggcagtgtgcaacctgcaggggtttggggcaaacatacctggctcaaagcctggtgccttggatcactggatgttctcatcctattccagtgagttcccgatgaaacctctcttgctctcagcctgtggtggagctcccagggtagttctaatctgaaactttggaagaaaccaatctgagctttcttccagagctgcagctgattaacttaacaacctggggtgcagtgttcaaggaggaaaacaggatgctctgagagaagcttagcagtgctgtgccaaagccagctccttctggtgggcaagagccgatttgttcaagttttgggaaatttgggaactgctggttaatagctacgatttcaaattaggccaggcgcagtggctcacgcctgtaatcccggcgctttgggaggttgaggcaggcagatcacaaggtcaggagtttgagaccagcctgggcaacatggtgaaatcccgtctctactaaaaatacaaaatttagctaggcgtggtggcaggtgcctgtaatcccagctactgggaaggctgaggcagaggagttccttgaacccgagaggtggaggttgcagtgagccgagattgcaccactgtactccagcctgggacagaccgggactctgtctcaaacaaacaaacaagcaaaaattaggccaggagcagtggctcgcccctgtaatcccagcactttgggaggccgaggcgggaggatcatttgaggttaggagtttgagaccagcctggtcaacatggtgaaacctcgtctctactaaaaatagaaaaattagctgggagtggtgttgggcacctgtaatcccagctactcgggaggctgagacgggaggatggtttgaacccgggaggcggaggttacagtgagcggagttagcgccattgcactccagcctgggcaacaagagtgaaactcttaaaaaaaaaaaaaaaggaataaggaaatattttccagtattcagaaatgattatgtgattcatcacagaagtcatccacatttttgatgaccaagtgaagttctttttttttttttttttaatttgagatggagtctcactctgtctctcaggctggagcgcagtggtgccatctcggctcactgcaacttctgcctcccaggttcgagtgattctccctgcctcagcctcccaagtagctgggattacaggcacctgccatcacaaccggttaatttttgtattttttttttagtagagacggggtttcaccatgttggccaggcttgtctcgaactcctgacctcaggtgatctgcccgccttggcctcccaaagtgctgggatgacaggcatgagccaccacacccagctggtttctagagtttctttctttttttttttttttttgagatggagtctcactctgtcgccaggctggagtgcagtggcgcaatctcggctcactgcaacctccgcctcctgggttcaagtgattctcctgcctcagcctcccgagtagctgggactacaggcacatgccaccacgcctggctaattttttgtatttttagtagagacagggtttcaccatgttggccaggatggtcttgatctcttgaccttgtgatgcacctgcctcggcctcctaaagtgctgggattacaggagtgagccactgtgcccagcctagagttgttttatgactttgtgccacgtcctggccgatggatgctcatgatgacatttattttatcgctctgcaatcaaagatttgtgcagatgaatgggaactgcgagagaacatgggaaaatgaaaggggtttaattgcgggagggaaggaaaacacataaaatgtattttttcgctttcccatgatttatttatttatttttattattattatattttgagatagagtctcgctctgttgcccaggctggagtgcagtggcatgatctcggctcattgcaacctctgcctcctgggttcaagcgattctcctgcctcagcctcccgagcagctgagattacaggcatgtgccaccaaacccggctaatctttgtatttttagtagagatggggtttcgccatgttggccaggctggtctcaaactcctgacctcaggtgatccgcccacctccacctcccaaattgctaggattacaggcgtgagccaccgcgcccggccttaccaagttctgattgaagtgaaatgcctggaagaaagataaagttaaaatgaggttttcacaacatgtcgaaatcactctgagcaaagttccaaacccaaggttctagaaagtgcaatgacttttttttttttaaacaggggcaattaaaaatttcccaggcttagcaagatcaaatgggtgtgtgcagcgctctctctgacatgcaatttatggaattattgatttgtcaatgtgatctctgcacttcctgtgaggaatttgaggtcctgtttggagaatttggtaaatagggaatctcgcagaaacatggggtcttgagaaactcatttcaaccctctgagcctcagtttccacttttctttttttcttttcttttctttttttttttttttttgagacggagtctcactctgtcacccaggctggagtgcagtggtgcaatctcggctcactgcaagctccgcctcccgggttcacgccattcttctgcctcagcctcccgagtagctgggactacaggcatccgccaccacgcccggctaattttttgtgtttttagtagagacggggtttcaccatgttaaccaggatggtctcgatctcctgacctcgtgatctgcccacctcggcctcccaagtgctgggattacaggcatgagccaccgcgcccggccttcacttttctttttttagaaagacagggtgtctgtcactcaaattggagtgcagtggcatgatcatagctcaccacggcctctaattcctgggcttaagtgatcctctcaccttagcctcccaagtagctgagaccacaggcatgtgccaccatgccctgctaatttttaaactttttgtagagacaggtttcactttgtttcccaggctgatctcaaactcctgggctcaagctatcttgtcaccttggcctcctaaagtgctgaggttataggcgtgacctattatgctggcaataaaataatttaaaacaaattttttagagacaggatctcacctggcacccaggctggagtgcggtggtgcagtcatagctcaccgcagcttccaactccttggctctggtgatcctcccacctcaagcccctgagtagcctggactacgggcacttcccaccatgcctggctaatttttaaattttttgtagagacagggactccctgtgttgcctaggctgatcttgaactcctgtgctcaagcaatcctctcacctcagcccctcaaagtgctgggattacaggcgggagccaccatgccccggccataaaatcagtttttaactcaggctgtacaacaataggcagtgagctgtgggctctaatttgcccaccgcaatacaggctgtgattatattgggaggcatttgggacatgaaacatggtcatgtttgtttgttttgttttgttttgcttttggccttgttctttttttgttttgttttgttttgttttgttttgttttttcagagagtctcgctctgtcacccagactggagtgcagtggcgagatcacggctcactgcaagctccgcctcctgggttcacgccattctcctgcctcagcctcccaggtagctgggactacaggcacctgccaccacgcctggctaatttttttttgtatttttagtagagacggggtttcaccgtgttagccaggatggtttcaatctcctgaccttgtgatccgccccccctcggcctcccaaagtgctggaattacagtcgtgagccaccgcacccggccagccatgttctttattatcaaactactgtgagtcacttttcttaaggttcattgatttgacacatttttattgaaaccctactaagtgccaggcattggatgagacaaaacccctgccctcacagagtttacagtctgggggagaaataggccacagataagatgccaggaagagccacagagatgaaaaaagtggggaaggagcttaggtgcagtggttcatgcctgtaatcccagcactttgggaggctgaggtgggaggatcacttgagtccaggagttccaggctagccaaggcaacatagtgaaaccttgtctaaaaattaaaaataaaggccgggcatgatggctcacgcctgtaatcccagcactttgggaggccaagacaggcggatcacctgagtcagaagttcgagatcagcctgcccaacatggtgaaacccagtctctactaaaagttacaaaaattagccgggcgtggtggcaggtgcgtgtaatctcagctactcgggaggctgaggcaggaaaattgcttgaacccaggaggcggaggttgcagtgagccaagatcgcaccactggactcctgcctgggcgacaagagcgaaactctgtctcaagaaaaaagaaaaaagaaaagggaaggaaggggatagaactgtggaagcagagagttgaggaaaggttggagttttagtttttgttttgttttttttgagacaatcttactctgtcacttaggctggagtgtagtggctcgatctcggctcactgcaacctccacctcctgggctcaagtgattctcctgcctcagcctcccgagtagctgggactacaggtgtgcaccaccacgcccagctaatttttgtatttttagtagagacagggtttcatcatgttgccaaggctggtctcgaactcatgagctcaagcagtctgcccacctcagcctcctaaagtgctgggatgggaggcgtgagccactgtgcctggccaaggttgcagttttaagaagtctgttggggtgagtctcattgaaaaggtgacatttgggcagaggcgggagtgtaccccacagatatcagggaaaggttttgaagcagagggcacagcccatgcaaaggccctgaggcaggagcacgcttggtgttggaggagcagtaaggaggcctgtgtagctatagcagagtgagcaagggggagagaaggaggaggggaagatggggagggggtaggggtagaggacagggcagatcatgcagcacattgtggaccatagggaggacttgggcattgacctccaaggaggtgggagccatagaagatttccggcagaggagggacaggctctgactccggtgctcacgggcgccctctggtgtctgctgcagggaagacaagtttgcaggacgagaatgggagctgagaaaccagggtggaggagagtgggctggtccaggccggctaaggagaggctgcgccaggtagaaggatgcattttgaacatggagcagacaagactttcctggtgtagagttttgcaggtatgagagaaaaactcagggataagaaatttggacctgacccctctggaaggatggtgcttctgtttgtaaaatgggaacgacagaccaggcgcgatggctcacacctgtaatcccagcacttcgggaggccgaggtgggcagatcaccagaggtcaagagttcgagaccagcctagccaacatggtgaaaccccttctctactaaaaatagaaaaaaaataggtgggcgtggtggcggacgcctgtcatcccagctactcgggaggcagaggtgggagaattgctcgaacctgggaggcggagttgagatggcaccactgaactccagcctgggcaacagatcgagactccatctcaaaagaaaaaaaaaaaaaagaaactttccccatggcagaagaaagactgggaggttaggtagttccggctgcagtagagaatgtgagtttctcataagatcctctagagggagccgggagctaggacgcaggtccagcctcttatccggagtcctcctcgtatcccccatcccccagcaggatgggcctgggtgggaaaagtggtggggtcagcaggggtggtctttgtctttgcaacagggaaggccctgtctacccttccagagttgggggcttggaggagaggggatgccaaattcgcacaggggttagcaaactttttcctaaagagccgtataataaatacacacacactaaataaatatatacacagtttaggcggggtgcagtggctcacgcctgtaatcccagcactttgggaggccgaggcggggggatcacttgagatcaggagttcgagactagcctggacaacatggcgaaacccagtctctactaaaaatacaaaaattagccaggcatggtggcgcgtgcacctgtagtttcagctacttaggaggctgaggcaggagaatcgcttgaacccaggaggtggaggttgcagcgagctgagatcgtgccactgcactccagcctgtgcgacagagactctgtctcaaaacaaaacaaaacaaaacgaaaaaacacacacacgcacacacacaaaaaaccacccagcttaaactctgtctgttgcagctcctgaaatctgctctcgcagtttgcaagaggccttagataacctgtacgcaactgggcatggctgtgtcctaatacagttttatttttagaggctgaaatgagaatgtcacataattttctgtgaatgctaccgctaccatgaaataattcttttttttttctttttttttttttggagacggagtctccctctgttgcccaggctgtagtgcaatggtgcaatctcggctcactgcaacctccacctcccgagttcaagcggttctcctgcctcagcaagactccatctcaaaattaaaaaataaataaacatataaataaaagttgcctaatctagaacctcctacaggcaacagtagctgcctggaatttaacaatgttgtttatttatttatttatttattttttgcttctgtttcaggcaccagatactacatttctttttaatttactctagcattataatgtttccttttacaaaagttgttgagaaggagtcttgctctgttgcccaggcaggagtgcagtggcgggatctcggctctctgcgagctccacctcctgggttcacaccattctcatacctcagtctcccgagtagctgggactacaggcgcccgccaccatgcccggctaattttttgtattttttttttttttagtaaagacagggtttcactgtgttagccaggatggtcttgatctcctgacttcgtgatccacccacctccgcctcccaaagtgctggcattacaggcatgagccaccacgcccggccaaccttcattttttttcaataaatttattttaaaaagaaaactttgtaacaggataataaattgaaaccaataatggatacccaaaatagaagggaactgtaaaaatacatgcaatggccgggctggcgcagtggctcacgtctgtaatcccagcactttgggaggctgaggcaggtggatcaacacaggtcaggagttcaagagcagcctggccaacatggtgaaaccccatctctactaaaaataagaaaaattagctgggcacggtggcgggtgcctgttgtcccagctactcgggaggctgaggcaggagaatcgcttgaacctgggaggtggaggttgtagtgagccgagatcacgccactgcactccagcctgggctacaggtgagattctgtctcaaaacaaaacaaaacaaaacaaaacaataacaataacaaataaataaatgcaatgtttactgttcttaagattattattatttctttccttcttttatttttttgagacagtctggctctgtcgcccaggctggagtgcagtggtgtggtctcagctcactgcaacctgcacctcccaggttggagcaattctcctgtctcagtctcctgagtagatgggattacaggcgtgcaccaccgcgcctggataatttttgtatttttagtagagacggggttttgcaatttaggccaggctggtcttgaactcctaacctcaggaatatcctcctgccttggcctcccaaagtgctgggattacaggtgtgagccaccacgcccagcctgccagggattaaacattaacgtcaatatttgagctggcaggggctttatattaccttcacatctatccccacatttcatagaccaagaaacagtctgggagagaagcaactctctggcatcacaagtttgctgctgagctagggataggactctctttctctctcttttgagacagggtcttgctctgtcacccaggctggactgcagtggtgccattatataccactgcagcctcaacctcctgggctcaagcaatcctcctgccttggccccctgagtagctgggaccacaggcatgcaccatcacacctggctaatttttgtattttttgtaaagatgggatcttgctgtgttgcccaggctggtcttgaattccttggctcaagtgatctgcccgcctcagccccccaaagtgctggcattataggcatgagccaccatgcctgcaccccaccccagattttttaattagctgagctaggtggcatatgcctgtggtcccagctactcaggaggctgaggtgggaggatcacttgagcctggagtttgaggctgcagggaggcctgggtgacagagggagaccctggctgaataaataaataaatagccttgcgcggtggctcacgtctgtaatcccagcactttgggaggccgaggtgggtgggtcacctgaggtcaggtgttcaagaccagcctggccaacgtggtgaaaccccgtctcttctaaaaatacaaaaattatccaggcatggtggcttatgcctgtagtcccagctactcaggaggctgaagcaggaaaatcgcttgaacccaggaggcagaggttgcagtgagccaaaatcgtgccactgcattccagcccaggcaacaaagtgagaccctgtctcaaaaaaaaaaaaaaaatagtagggttacatgttgggaaatttaggtacagaatcagatacgcgcaggaaggtagataatgtgaagtgagactcagggagaaggaagcatgtatcggccaagcagaaagacctcagaaggaatgaacccttggccacatgtggtggtgaacgcctgtaatcccagctacttgggaggctgaggcaggagaatcgcttgaacccgggaggtggaagttgcagtgagttgagatggcaccactgcactccagcctgggcaacaagagtgaaactccgtctcataaaaaaagagaaggaatgaatcctgcccacaccttgatcttgcagactagatagggaagcccagggatacttcagttcttggggcctggaaatgctgtcctcctcaacccccaggccaaccccggtagggtggagcggaggagacaccccctgcccctgccctgtttcctcctccaccaacgggaaggatgccagtgggggcctcctgtgcctccttttccaggtgagagggtccgctgtgacccttggacctaccagccataaagcaatcaccgggaggaggtggtggcgagactgggaggtgcggactggactgaggggtgtggatcaggagatgagacgggttaggtgctgactctcggtaccgtcctgcagacaacctgttcccctgaaactggtggacagactttctttttttctttctttctttttttttctttttctttttgagacagagtctcactctgttgcccaggctggagtgcaatggcgtgatctcagctcactgaaacccctgcctcctggttcaagcgattctcttgcctcagcctcccaagtagctgggattacaggtgtgcgccagcacgcccagctaattttttgtatttttagtagagatagggtttcactatgttggccagtctggtctcggactcctgacctcaggtgatctgcctgcctcggcctcccaaagtgctgggattacaggtgtgagccaccgcgtccagcctatttacttcttatacaggaatggtttcattcagcatcttcctctcgtgggtggggagtggggaatgtctcctcagtcttgctccctgttggatcccagcacccggcacacagcaggtgctcaataaataacagttacaggaatgaatgaatgaatgaattctcaagcacagtgtcctccattctttaagaagggcagagcgagtcccccaaactcacaggatttggaggccctggctccagtgttctgtcttcacccacccctctgagagcagaggctggaactcctgggatccacccaggacatcagaggagagttggatgcctggagggtcaggtcctaatcaatgtcatcgcccgtgaggccggccagagtccccctgtggcctcccagcctctggctggcccctggcacacccacatcacaagggttttactcactgcctggctgtattacaagggagggaaggggaggagggggaggaaaaggaggaggaggaggagggagggaaggggagacgggagaggagaggaaggggaggagggcaagagggaggaggaggaagggaggagggaggggggaaggggaggagtgggaggaggagggagaagagaggaggagggggaggagggaaaggaggagggagaggaatggggaaagaaggggaggaggggaggatgacgggggagtggaaggagaaggaaggaagcacggaggagtgggaggaagaggagaaggagaaggaagggaggagggagaggagaagggggagaagggagaggtggggaggaggggaagagggggagaagggggaggtggggaagaaggaggagggtgagagagaggaggagggaggaggctgaggaggagggagaggagggagagaaaaagaaggagggagaggagtggggaaggaggggaggatgagagagaggatggggaggggaaggagaagagggaagggagcagggaggaaggggaggaaagagaaggggaagaggagagggaggaggagggaaaaggccaaggaggagggagcagggaggaggaggaaggcaagaggaacagaatggagagggaggagggagaggaggagtgggagctgctgccctcctggacccactcactttttccaccgggaactggcccacaagggtggtgctcaaggaccccagggcaagtccccccgaccccgcatctgtagcaggggacctgggtgttgtcagttctcctgcctgactcatgcaatggccaagtgagtcacatccccttatcagctcctctgtcctcctgtgcagaatggggactgtccttacgatcagagctgtgcagaggccaaagggctaaggcaaccaggaagggacagccgggcatccgctgggcgtcacgggactgcagtcagatagatttcttttttcttttttttttttttgagacggagtcttgctctgtcgccagtctggagtgcagcggcaaaatctcagctcattgcaacctctacctcccgggctcaagcctcctgagtagctgggattacaggcatgcaccactgcgccctgctaattttgtatttttagtagagacggggtttcaccatgttggccaggctggtctcaaactcctgacctcaggtgatcctcccacctcggcctcccaaagtgctgggattacaggcgtgagccacctcacctggccagaagtccctttttagcgctttccgtgggaatgctcccacatgtggttcgtcctttatccctggctttacacatgaggaaactgaggcagggggaggcagtcgtttgcccacagtcacaggggggcaagtggcagagccaggattctgtccaatagaccatgtagacttttttttcctttttgagatggagtctcactctgtcacccaggctggagtgcagtggtgcaatctgggctcactgcaacctccacctcccgggttcaagcgattctcctgctttaccctcctgagttgctgggattacaggcgcctgccaccatgcctggctaatttttgtatttttagtagagacggggtttcaccatgttggccaggctggtctcgaactcctgacctcaggtgatctacctgcctcggcctcccaaagtgctgggattacaggcatgagctcctgtgcccagctaatttttgtatttttagtagagatgggttttcaccatgttggtcaggctggtctcagactcctcacctcaagtggatcgcctcagcctcccaaagtgctgggattacaagcgtgagccaccgtgcccggcccacgtagacttttatttattcacttatttattgtttatctccacgttcctgaggtatcctcttaagttttccagcagctatattttaaaagttcaaggcaaaattaaatttcacttaaaaaatatatttgtggccgggcgcagtggctcacgcctgtaatgccagcactttgggcggccgaggtgggaggatcacgaggtcaggagattcagaccatcctggctaacacggtgaaaccccgtctctactaaaaatgcaaaaaattagccgggcatggtagcacgtgcctataatcccagctattcgagaagctgaagcaggagaattgcttgaacccgggaggcagaggttgtagtgagccgagttcgtgccattgcactccagcctgggcgacagagcaagactccgtctcaaaaaaaaaaaaaaaaattaaataatgatgaactcttgctcgtttgatgacattgtattttttgcgcaatgggaaactcctgtggttcccgggacagcacgctgttgtatgttctgctgggtgggtttatgagaattgacaacagtgtgcaaacacattgggcaatgcagggctttatacagggacgtgttccattgtcaagcttttattgactttaccacttggctcaaaacatgggaagggccaggtgtggtggctcatgcctgtaatcccatcactttgggagaccgaggcaggcagatcacctcaggttgggagttcaagaccaacctgatcaacatggtgaaaccccgtctctactaaaaacacaaaattagctgggcgtggtggcgggcgcctgtaatcccagctactcaggaggctgaggcaggagaattgcttgaacctgggaggcagaggttgcagtcagccgagatcgcagccattgtactccagtctgggcaacaagagcgaaactcagtctcaaaaaaaaaaaaaaaagagggtttggcgtggtggctcatgcctgtaatcccagcactttgggaggctgaggtgggaggatcacttgaggccaggagtttgagaccaacctgggcaacatgaagaaacctcatctccacaaaaaaatacaaaaattagccaagcgtggtggcacgcacctgtagcctcagctacttgggaggttgaggtgggaggatcacttgagcctgggaggcaaaagttgtagtgagccaagatggcgccactgcactccagcctgagcgacagagtgaaaccttgtatcaaaacaaacaaacaaacaaacaaacaaacaatgatgtgttagcaataaagtgacagagagtctacagagggaacatgtacttaaacacattgctgaaaatgactgcaggaattttactttagattccaagttattgtccctttgagatacgtagtcgtgttcagtggataaactgctatgaggtcaatggcagtgaaaagtccttctgtccccacaagagcttctttttcttcttcttcttcttctttttttttttttttttgacagaagctttctctgtggcccaggctggaatttagtggcgtgatctcggctcactgcaacctctgcctcccaagttcgagtgattctccagcctcagcctcctgagtagctggcattacaggcgagtgccaccacgcccagctaattcttgtattttttagtagtgacagggtttcgccatgttgggcaggctggtctcaaactcctgacctcaggtgatccgcccacctcggcctcccagagtgctgggatgacaggcgtgagctaccatgcgggccaagtgcttattcttatcctccctgttaacagatacctgaaatcccttcattgaggtgtacaaaaggcttctaaagttcataataataagtattgttatttttgagaaaaagtctcgccctgtggcccaggctggtgcagtggtgcagtcacagctcatggtagcctcaaactcccaggctcaagcgatcctcctgcctcagcctcccaagtagctgggactacaggtgtgcaccaccatgcttggctaatttttttttttttttgagacggagtcttgctctgtcgcccaggctggagtgcagtggcgcgatctcagctcactgcaagctcggcctcctgggttcacgccattctcctgtctcagcctcccgagtagctgggactacaggtgcccaccgccatgcccagctaattttttgtatttttagtagagacggggtttcaccgtgttagccaggatggtctcgatctcctgacctcgcgatccgcccgccttggcctctcaaagtgctgggattacaggcgtgagccaccatgcccggcccttttctttttgatagagggtcttgctctgtcacccaggctggggtgcagtggcatgatctcggctcactgcagtctccacctcctgggttcaagtgatcctcctgcctcagcctcccgagtagctgggattacatgtgcccgccaccacatctggctaatttttgtatttttagtagagacgcggtttcaccatgttggccatgctgcctggctaattttttaaacttttttgtagttatgaggtcttgctctattgcccaggctgatcgggaactccagggcttgagcaatcttcccgcctcagcctcccaaagggcttggattaccggcatgagccacggtgcccggctccagcaggttttgataagagaagggggagtgatctctctcgagggcactagaactcccaagagtgataaacggggtgaggagaggcagagaggagtccagaagtcaaacatcacctacttgatccacccactgtgatggccctggaaaaaagcctccacggcaaatgctgaataaatattatgactgggatcactaaagccaagccaaggcaaacaacccctctaaaatccaacacagagcagataaaaggagatcagaaaaatgtagaggtcaagggcgagataattctagtagcacccagacagggacaggtaccgttatcggggtctcttcttgggccccgtggagcttggggacccggatccttctatggggtggggccatcctgggcactggaggttgctgagcagtgtccctggcctccacccaccccgcgccagggccacccccctttgttgtaacaaccacagatgtcctcagacatcacccagtgtcctcgggggagtgtaaaatcaccctgggtgagctcccctgggttaggggattccatggacccccaagagactgtatcccgtgatgctctgccctgctgaggtcccaggaggctgcacacattgaaatccatgccctgaatggggaaggagggaggaggtgaatcccaggatctggggttcccctggtttataccgtctgccctgttgggagtttattctggtgtctggtgtgagcagggaacccactcaattttttcccaaataattaatgcagtctttctcccccagatcccgtggctgtggggcaggattgctttctggggtggggccgtcctgggcactgtagggtgctgaacggcatctctggccttcacccattctatgccaggagcatctcgcactcgtgacaaccacagatgtcccagacattgcacagtgagtgtcctgagtttccgtccggaaggttgaggctgcagtgagtttttttttttttttttgagatggagtctcgctctgtcacccaggttggagaacagtggcaccgatctcggctcactgcaagctccgcctcccaggttcacgccattctcctgcctcagcctcccgagtagctgggactacaggcgcccaccgccacgcccggctaattttttttttcgtatctttaatggagacagggtttcaccgtgttagccaggatggtctcaatctcctgacctcgtgatccacccacctcggcctcccaaagtgctgggattccaggcatgagccactgtgcccggcctgctgcaatgagttttgatcacagcactgcactccagtctgccctagtggagggcaagtgcagtaatgtgagttagtgttggataaaagaaccatatcgtgtgtggcatatggtagccccttattgaattttgatttcatgaatacatatgagtgatccattgaaaaatataaaccaggccgggcgtggtggctcatgcctgtaatcccagcactttgtgaggccaaggcgggtgaatcacttgaattcaggagttcaagaccagcctggccaacatggtgaaaccccatctccaccaaaaatacaaaaattagctgggtgtggtggtgggagcctgtaatgccagctactcaggaggctgaggcaggagaatcgcctgaacctgggaagtggaggttgcagtgagctgagattgtgctactgcactccagcctgggcgacagagcgagactctgtcttgagaaagaaagaaagaaagagagaaagaaagatagagagagaaaagagaaaaaaagagagaggaaagaaggaaggaaggagggagggagggagggagagaaggaaggaaggaaggaaggaaaggaaggaaggaaggggaagggaaccaggatgtgaatttttttagagcaaggagggcacataaattacccctctcaacctagcacatggcacagtgtccagcaaacagaaagcttgatttagtctcctatttgctaaacttccaacagtgccctgctgtttagcacaaaccaaactccttgccacaacacacagggctttgcacgacctgccccgtcccctccctgccttcccctcctccctgccttcccctcctccctgtcttcctctcctgcctgtcttcctctcctcactctgctccagccacaggggtctcattgctgttcctccaatgcgctaggcacggacctgcctcagggcctttgcacaaactgtgcctctgcctgggacacctttccccagaccttcccagggccagttccatctcatccttcaggactgcactgaacatgtcattttttttttttttgagacagagtctcactgtcgcccaggttggagtgcagtggtgtgatctcagctcactgcaacctccgcctcctgggttcaagtgattctcctgcttcggcctcccgagtactggtattgcaggcatgtgctaccacacccatctaatttttatatttttagtacagatggggtttcaccatgttggccaggttggtctcaaactcttgacctcaggtgatccacccacctcggcctcccaaagtgctggcattacagatgtgagccaccacgcttggtctaatatgtcatctgctaaagggggactttgcctgggcacagtggctcatgcctgtaaatccagcactttgggaggctgaagcaggtggatcatttgagcccaggagtttgagaccatactggccaacacagtaagaccccatctctataaaaaaaaaaaaacaaaattagccaggtgtggtggtgcacgcctgcagtcctagctacttgggaggctgagacgggaggatcacttgaacccaggagttggaggctgcagtgagctatgatcctgccactgcactccagcctgggcaatagagtgagaccctgtcctccaccaacaccaaaaaaaaaaacaaaaaaacaaaacagggctcctctctcttggtagggggtggaggggaggtcagagacacctctcagccacccgggctgattcacaaatatcgaacattcactaaaatgtcaatacagtgacctagagccagaggggaagagggagggtacaagaggagagttccaggcagaggggcgagcaggtgagtaggtgcaaaggccctaagcaggaaccagtttggctccataaatatttgttgactcaatgaacgatagaagattctagagagaattgattgcacagaatcacccatggggactcagaggcggagtccaagctggtttcggagggggctgggggccggaggttggcaggtggggtgaaggatgggagccgctagctgctggcaggaaaactggcttcagtgaagatctggtctggtcctcttggtttgtttctgtccagggagtggacaggacccatgtaagggccctgggctatcccagaacccatctgggaattctgaagagaaaaagtcctgtaactggccgggtgcggtggctcacgcctgtaatccccgcactttgggagactgaggggccgatcacgaggtcaggagttcgagaccagcctggaaaacatgatgaaacctcgtctctactaaaaatacaaaagttagccgggcatggtgatggggacctgtagtcccagctactcgggaggctgaggcaggagaatcacttgaacccaagaggcagaggttgcagtgagccgaaatgagatggcaccactgcactccagcttgggccacagagcgagactccgtctcaaaaaagaaagaaaaaaagaaaaagtcctcataagtagggcagaggtcacggcagagtggaggtaccccagacttcgacctttgctcactgagggctggaaaaccacaaaacacccagataacggtcttccctcccctgctcctgcctgccccagtgtcactggccctcaaccctgtctctccaccctgtccaccaatcagcacctggaggtgggctgggagctgcctgtgaccgcttcagcatcttttgggagtggtgacagagccacagagggctgtgagcttgcccggccccaggtaacgctggcggtgggtgggcctccagcttggagcagagaccccccgaggcatctgcagacagaactggatggacccatgaatacggatttagctgctggaaaggtgagccctactaggtccccagggagagcgggagtctaggctgggaaagcctacccaagctgccagagctggaaggaccccatctccacccctattgtacagatgggaagactgaggcccagagaaaggatgcaatgagcaaaactgtgtgcctttgccccggggctgcccttgtctttcttccaggtccccctgcctcctaggagcgggcacttggggaggctgtgaaggcctgagaggcaagcggcatctctagctagggcctctctccagcactttttattttattttattttatttttatttttattttttgagatggagtctccctctgtcacccaggctagagtgcaatggcacgatctcagctcactgcaacttccacctcctgggttcaagagatcttcctgcctcagcctcccaagtagttgggattacaggtgtgcaccaccacgcccggctaatttttgtacttttcctagagacagggtttcaccatgttggctaggctggtctcaaactcctgacttcaggtgagctgcccgcctcggcttcccagagtgctgggattacagatgtgagccaccgtgcctgccatacttttttgttttttgaaacaaggtcttgctctgtgacccagggtggagtgcagtggggtggccatagctcactgcagcctcaacctcctgggttcaagggatcctcctacctcagcctccccagtagctgggacgacaagtgtgtgccaccgcagccagctaatttttttaaattatttgcagtagggataggggtctctatgttgcgcaggctggtcttgaactcctgggctcaagtgatcctcctgccccggcctcccaaagtgctgagattacaggcatgagccaccacatccagcctctccagcactttaagagaaattggctctcacactgtggaattctctctatcagcctcaaagtccagatttggaaagggagtctcagcgaggggcagcagctggcccaacccggaggcagagcggcaactgaactctagccggaaagagccagggttatgtgcacatgggaggtggggaggacaggggctgtatgtgaccctcacatctgttcctcgcgccccagatggcttctgctgcctgctccatggaccccatcgacagctttgagctcctggatctcctgtttgaccggcaggacggcatcctgagacacgtggagctgggcgagggctggggtcacgtcaaggaccaggtgaggagtccactgcagttgccccgggaccacagagctccaggcgggccaactgaggccccacgaaggtgctagacccgccagagcccagccagagctctgctcagctctacgatgcactaatgggtcacggtgcttgattttagccaagcacatcatttagcgggtagcatcagctccttcttacaggtggggaatggaggcccagagcagggtggaaactcatccaaagtcacacagcaatttggagttaggttcaaactcaaacttggggcatctccctggctaggttcggttctcttctccttcctctccttcctttctctctttcttcttcttttttttttttttgaaggagtctcgctctgttgcccaggctggagtgcagtggtgccatctcggctcactgcaacctctgcctcccgggttcaagcgattctcttgcctcagcctcccaagtagctgggattacaggcgcccgccactgcacctggctaatttttgtatttttagtagagatgggtttcactatcctggccaggctggtcttgaactcctgaccttgtgatccacccacctcagcctcccaaagtgctgagattacaggcgtgtgccaccgcgcccggcccactttcttttttttctttcttttctctctctttttctctttccttccttccttccttccttttttccttcctttctccctctttcttttactctctttttttttttttgagatagagtttcactcttgtcacccaggctggagcgcaatggcgcgatcttggctcactgcaacctccgcatcccaggttcaagtgattctcctacctcaacttcccgagtagctgggattacaggcagccgccaccacgctcggctaatttcttgtgtttttagtagagatggggtttcaccatgttggccaggctggtcttgaacttctgacctcgggtgatccacctgccttggcctcccaaagtgctgggattataggcgtgagccaccacacccggcccttttttctctttctttctctctctctctcgtttctctctctctctctctctctctctctctctctctctccccccctctctctctgtctctctctctctccccctccctcccttcctcccttcctcccttccttcctctctctctctctttcttagacagagtttcgctgttgttttgcccaggctggagtgcaatggtgtgatcttggcataccgcaacccccacctcccaggttcaagtgattctcctgcctcagcttcccgagtagctgagattacaggcatgtgccaccatgcctggctaattttgaatttttagtagagacggggtttctccctgttggtcaggctggtctcaaactcccgacctcaggtgatctgcccgccttggcctcccaaagtgctgggattacaggcctgagccaccgtgcctggctcttttgtttttctttttttcttttttttttttttttgagatggagtcttgctctgttgcctagggtggagtgcggtggcgtgatctcggctcactgcagcctccgtcttacgggttcagaatctccttcctcagactcccgagtagctgggactacagatgcccgccaccacgcccagctactttttgtatttttagaagaaatggggtttcatcatgttggccaggcggatctcgaactcctgacctcaagtgattcgccctcctcggcctcccaaagtgctgggattacaggcaggagccactgcacctggcactggctgggatttttatgctatgttactgcgtttgagcctcagcagccccgggaggaagaagcagtaactcatcttggagaagggaaggacacctaaggcccaaagagggtcactggtttccctggggccacacactaatctaaaaagagtgagcacttcctaattcctactacccctccctgtccaccccagcaggtcctgccaaaccccgactctgacgacttcctcagctccatcctgggctctggagactcactgcccagctccccactctggtcccccgaaggcagtgatagtggcatctccgaagacctcccctccgacccccaggacacccctccacgcagcggaccagccacctcccccgccggctgccatcctgcccagcctggcaaggggccctgcctctcctatcatcctggcaactcttgctccaccacaaccccagggccagtgatccaagtacctgaagcctctgtgaccatagacctgggtgagtcctgctgtgtctctgcccaccgccctcaccttgttccagggcccttcctgtaagtgaggaaatggaggcccagagagggctggcatcttgtccaaggtcacacagcaatttggagctgggcccagactcaaactcaggacacgtgtctcccttggctaggtgtttccatgctttcacgtggatgctattgggagcccattttccagatcgtgaaacagtcctgtcaggttgagcaatgagctaaaaccacagagctaggatgcaaccccggcaggtggctcaggcaccaggcatggtgctgacaagcacagcccaaagtcagggtcttgccttctacgtgtctgtaccccgtgcctggttcctagtagatttttttttattttttatttatttttattttttgagacagagtttcactctgtcacccaggctggagtaaagtggcgcgatctcggctcactgcaacctctgccttccaggttcaagcaattcacctgcctcagcctcctgagtagctgggatcacaagcatatgccaccatgcccagctaatatttattttttagtagagacgaggtttcaccatgttggccaggctggtcttgaactcctgagctcaggtgatctgcccacctcagcctcccaaagtgctgagattacaggtgtgagccgctccacccagcctgtagatgctcaataaaagtgcatgaggttaccaggtcctaggttccagggtgctcctcctagacgtggggaacagcagatcagtaatgatttactctattgattaagcattcccggcgggccaggcagagccctggctggagatacttggcctctgggtggcctttgtcccttgacccttgctatgagctcttcttggtcccattggagagttgacaaaactgaggctcaggcccggagcggtgactcatgcctgtaatcccagcactttgggaggctgaggcaggcggatcacttgaggttaggacttcaagaccagcctggccaacatggtgaaaccccatctctactaaaaatacaaaattagccgggcatggtgggggccacctgtagtcccagctactcaggagcctgaggcaggagaatcacctgaacccgggaggcggaggttgcagtgagctgagatcatgccactgcactccatcctggctgacagagccagactctgtctcgaaaaaaagccaaaaacaaaaaatgctgggcacagtggttcacgcctgtaatcccagcactttgggaggccgaagcgagcggatcacgaggtcaagagatcgagaccatcctggccaacatggtgaaacctctgtctctactaaaaatacaaaaattagctgggtgtggtggcaggcgcctgtagtctcagctactcgggaggctaaggcaggagaatctcttgaacctgggaggtggaggttgcggtgagccaagattgccacactgctctccagcctggcgacagagcgagactccgtctcaaaaaaaaaaaaaaaaaaaaatctgaggctcagagaggtgaagtcacttactcaaggtcacacagccctgcccaaccaggattagaaccaagggttacctgacccaaagtttgtgtgctgggacagcatgcctactgcatgccggctaccaggaggggacaaccagaggtgaatcagacctcgtccctgccccttgggtgagataacgcctggctggctgcaaatctagcctgtaattctgtgtgataacagccactcccttttgaatcagccggtgtctcctgacaatgtcctgtgtcttcctcagccttgtgggacggacagaaccaagccctgttgaatttgggtccccatcttttttttttttttgagatggagtctcgctgtgtcacccaggctggagggcagtgccacattctcagctcactgtaacgtccaccacccgggttcaagtgattctcctgcctcagcctcccgagcagctgggattacaggtgcacgccaccaggcccggctaatttttgtatttttaatagagatgggatttcaccatgttggccaggctggtcttgaactcctaacctcagatgatccgcctgccttggcctcccaaagtgctgggaatacaggcgtgagccaccatgactggctgggttcccatcttatagcagaggggagaccgagtcactagtgagggctgcccccttcaactcaggccttggggactccaaactctggcagaagtcatatgaatgttgggattaatcatgggagacttggtggaggaggcggttagaggctggaagctcaggactccccccgtctgacactctccctgtctccgtccccacctgccctggtcagaaatgtggagcccaggaggaaggatctgtgctgagaagccggctgatccggtggacctgtccccacgatgcaatctcaccgtgaaagacctcctcctttcgggcagcagtggggacctggtgagcacccccacaccctcccatggggcgttggagctgggagggctgctcgggttcgaggagcctaaatatccccgtttcagagactggaaaactgagtcacagaaaggcgtggaatttgcccacagttagagaccattccagtcctgggctcactgtcgcctgggctggggtgtcttcctctgtagtacttagtagtaacaatagcaacaacaactaaaagctaaaactggctgagtgtggtggttcacacctgtaatcccagcactttgggaggccaaggcaggcagatcgcttgagctcaggagtttgagaccagcctgggcaacatggtgaaaccccatctatacaaaaaatacaaaaattagcctggcatggtggcacatgcctgtggtcccagctactcgggaggctgaggtggaaggatcgcttgagcccaggaggtcaaggctgcagtgagctgtgattgtaccactgcactccagcctggccaacagaccaggactgtctcaacaataacaacaacaaaaagaacaaagctaaaactgaggctgcacctgctatatgccaggcgctctttatttatcatcttaaaaaagttttttttgagacaggatctcactctatcgcccaggctggagtgcagtggcgcaatcctagctcactgcagcctcaaactcctggcctcaagcgatcctcctgcctcagactcccaagtagctgggactacaggcgtgcaccaccacacccagctaatttttcttgtcttttttattttattttatttttctgagacagaatcttgctctgttgcccaggctggagtgcagtggtgcaatctcggatcactgccacctctgcctcccgggttcaagtgattctcctgcctcagcctcccaagtagctgagattacaggcatgcaccaccaggcctggctaattttgtttttcttttttctttttttttttgagatggcgtcttgctctgtcacctaggctggagtgcagtggcgtgatctcggctcactgcaagctccgcctaccgggttcacaccattctcctgcctcagcctccccagcagctgggactacaggagcatgccgcgccacctgtctaatttttcttttcttttttttttttttttttgagacggagtcttgctctgtcacctaggctggagtgcagtggcgtgatctcggctcactgcaagctccgcctaccgggttcacaccattctcctgcctcagcctcccgagtagctgggactacaggcgcccgccaccacacctggctgattttttgtatctttttagtagagatggggtttaactgtattagccaggattttttttgtatttttagtggagacagggtttcatcatgttagccaggatggtctcgatctcctgacctcgtgatctgcccacctcggcctcccaaagtgctgggattacaggcgtgagccaccgtgccccgtttagacccagctgatttttcttttaatttttttctgtagatatgggtcttgctatgtttcccaggctggtcttgaactcgtagcctcaagtgatcctcctgctttgtcctctcacagtgctggattataggcatgagctactgcgccccgcctggggcttttattatcttaattttacataggagaaaaagggcacagagaggttcagtcatttgcccaatgctacacagctgatgcaggcttgatccctgggatggtctattgagcttatggtgcccattgcacaccaattgaaggccatctaccctgccaagggcttcacgctcccataagccaggtttgacaacccaaacccattttgcagatgagaaggtaggtcaaggcccagagaggttaagccatgagccctaagtcacacagcatgcaagtggcagactcagggttttgaaatcctgtttctccaatgccaaaggttatcctgataatctctagtgaaggccagggtgcccctggcaactagagggatatgcagtgagcaccagctgtgtgctcagcctctaggatctgatggtcaggatggggcgatgtactgttcattaaggtgtacagaaaagaaagagagcctgcagggtcactgcagatccaggaaggcttcccggaggaggcagtacttcagcaggccatgaaggaagggaaaggagaatgaacgactgctttggcaatgataactggcttattttgttttattttatttgtttattttttgagacagagtcatggtccgtcgtccaggctaagtgcagtgccacagtctcggctcactgtagcctccacctcctgggctcaagtgattctcatacctcagcccccaggtagctaggactacaggtgcctgccaccatgcccgactaatttttgtatttttagtagagacggggtttcaccatgttggtcaggctggtctcgatctcctgacatcaggtgatccacccgcctcagcctcccaaagtgctgggattacaggcatgagccactgtgcctggccttattttattttatttaaagtcaaggtttccctctgtcaccacaactgcctcaaattcctaagctcaagtgatcctcctgcctcgacctcccattttttttgtatagctgacatacagaacaacgatacaaaaaaaaatgatgcatttataaatgctagttatcagcagttgaagaccagcctgggcaacatagcaagacctcgtctctacaaaaaaaaaaaaaaaaaattagctgagtgtggtggcgcacacctgtagtcccagctactcaggaggcagaggcaggaggatcacttgagctcaggaggtcaaggctgcagttagctatgatcacacgactgcactccagcctgggtgacacagtgacatcttgcatcttaaaagaagaaaagatgggtgtggtggctcatgcctgtaatcccaggaatttgggaggctgaagtggacagattgcttgagcccaggagtttgagaccagcctgggcaacagagtgaaaccccatctctacaaaaaattcaaaattagccaagcatggcggtacgctctgtggttccagctactcgggaagctgaagctggagaatcgcttgagcccgggaggcggaggttgcagtgagccaagagagcaccacggcactccaacccgggtgaagtagcaagaccctatttcaaaaataataatagtaataatacaatgaaaagaagaaagctgtcaaaagggccgggcgcggtggctcacgcctgtgatcccagcactttgggaggccgaggcgggcagatcacgaggtcaggagatcgagaccttcctggctaacacggtgaaaccccgtctctactaaaaataacaaaaaattagccgggcgtggtggcgggcacctgtagtcccagctactcaggaggctgaggcaggagaatggcgtgaacccgggaagcagagcttgcagtgagccgagatcgcgccactgcactccagcctgggcgacagagcgagactcgtctaagaaagaaagaaagaagaaagaaaagaaagaaagaaagaaagaaagaaggaaggaaggaaggaaggaaagaaagaaagaaccctgtccatatgccattttgcgcgtgtgtgaggatatctgtaggactgatttctgaaggtagaatgacccggtcaaaggaccgtgtgttggttatttcgagccctgctgccaagggagattctgtggtggcaggagtgatagtttttgttgttgctgttttgagacagaatttctgtcgcccaggctggatctcagatcactgcaacccctgcctcccgggttcaagcggttcttctgcctcagcctcccgagtagctgggattgcaggcacgtgccaccacaccaggctgatttttgtatttttaatggagacagggtttcaccatgttggccaggctagtctcgaactcctgacctcaagtgatccacctgcctcggcctcccaaagtgctgggactacagacgtgagccaccttttctttttttttttttttgagacagagtcttactctgtctctcaggctggagtgcagtggtgtgatctgggctcactggaacctctgcttcccgggttcaagcagttctcctgcctcagcctcctgagtagctgggattacaggcgccgccaccatggtcgggtaatttttttttttttttttttttgagacggagtctcatactgtcactagggctggagtgcagtggcacaatctcggctcactgcaacctctgacttctgggttcaagcgattctcctgcctcagcctcgcaagtagctggtattacaggcacccgccactacgcccagctaactttttgtatttttagtagagacggggtttcaccatgttgaccaggatggtctcaaactcctgacctagtgatttgcccacctcggcctcccaaagtgctgggattacaggcatgagccaccgcacctgggcaatttttgtatttttagtagagacgaggtttcatcatgttacccaggctggtctcgatctcctgagctcaagtgatccacatgcctcagcctctctaagtgctgggatgacaggcgtgagccaccacacccagcctggggtgatagtgttttcgatctgatacctctttcatttcctgaaggcagttggcgtccctgcacccgccgtcattcctctgattttttccgtagcaacagcatcacctgggggcctcctacctcctgcgacctggggctgggcactgtcaggagctggtgctcaccgaggatgagaagaagctgctggctaaagaaggcatcaccctgcccactcagctgcccctcactaaggtgagtctggggggacttccagccctggatccatctccccttcgtgcacttacctgcatgtgtgtcccacctttatttatttatttagagtagagtctttctctgtcactgaggctgggatgcagtggcacgatctcagcttgctgcaacctctgcctctcagattccagcgattctcccgcctcagcctcctgagtagctgggattacagccatgcgccaccacgcccagctaatttttgtatctttagtagagacagggtttcaccatgttggccaggctggtctcgagctcctgacctcatgtgatcctcctgcctcggtctcccaaagtgctgggattccaggcgtgagccaccgcactggctatgtgtctcacctttagaacacccgtactagaatgctatgctgtgtctgtcaccagagccaaaacaatcagtcagaagccccattgtaaattcaactcagagggtaattatcaacatccaggaatgaatggcggactccaggtggcagcaatttgggtgcagcaaacttttttttttttttggagatagggtcttgctgtgtcccgctggagtgcagtggtgccatcatagctcacttcagccttgacctcctgggctcaagagatcctcccgcctcagcctctcaagtagctaggatgacaggtgcacgccactacacttggctaatttaattttttttttttttttgtagaaatggggtcttgttatgttgcccaggctgggctgggactcctgggttcaagtgattctcccaccttggcctcccaaagtgttgggattacaggcatgagccatcatgcctggccctgcagacatgttttgattggactgtactgcattttatacatttttgaattgcttgataatgtttttctgaccggtagattttacaagagaactcagtgacttgaggctgggcacggtggctcacacctgtaatcccagcactgtgggaggctgaggcagaggatcacttgaggtcaggagttcgagactagcctggccaacatggtgaaaccccgtctctactaaaattacaaaaattagctgtgcctggtggtgggcaactgtaaggtgcttctcagcctcccagcttctcaggaggctgaggcaggaggatctcccttgaacccgggaggtggaggttgcagtgagccgagatggtaccactgcactccagcctgggtgacaagagcgaaactctgtcaaaacaaaaacaaaaacaaaaaaactaaaaacataaacaaaacaaaatccaaaaaaccaactcaattacttgaatgtcctctgtttcatattctcaaacctccatatgcaccagtcaatggctgggtagctgtttgggttctctagctaaccacagtccccacccagcctgctgcactcagtatcaatgcctgagtttgatattctcatctgttttttttttttttctattgagacaggttctgactctgttgcccaggctggagtggagtgaggtgatcttggctcactccaacttccccctctggagtacaagtgattctcccacatcagcctccctagcagctgggactacaggtgtatgccattatgcctagctaatttttttttttttcctgagacggagtttcgcttttgttgcccaggctggagtgcagtggcgcgatctcggctcactgcaacctccgcttcccaggttcaagtgattctcctgcctcagcctcctaagtagctgggattacaggcacgcgccaccacgcctggctaatttttttttttttttttttttttgagtagagacagagtttcaccatgttggccaggatggtctcgatctcttgaccttgtgatctgcccagctcagcctcccaaagtgttgggattacaggtgtgagccactgcgcccagcatttttttttttccttagagacagggtcttgctatgttgcccaggctggtctcaaactcctggcctcaagcagtcctctgaccttggcctcccaaagtgttaagattacaggtgtgagccaccgtgcctggccccatctgtttctattgttgttgttgtttgttttgagataggatctcactttgtcgctcaggctggagtgcagtggtacaatctgcaggtagcagctaactgcaaccttgaactcctggtctcaagggatcctcctgcctcagcctcccaagtagctgggactataggcatgcaccaccacacccagctgattttgtggttgttgttttgttttagtagagacagggtctttactaaatgttgcccagtctagtcttgaactcctggacttatgcgatcctcttgccttggcctcccaaagtgctgggattacagcactgtgaaccaccgcgcccagcctgacattcccatttgaagacacttattggccgggtgtggtgtctcatgcctgtaatcccagctctttgggaggcaaagatgggcggatcacctgaggtcaggagtttgagaccagcctggccaacatggtgaaaccctgtctctactaaaaatacaaaaattagccaggcatggtgttgtgcacctgtaatcccagctacttgggaagctggggtgggagaatcacttgaaccctgggggtggaggttgcagtgagctgagatcttgccactgcactccagcctgggtgacaagagcgaaacaagaaagaaagaaagaaagagagagagagagagagagagaaaaggaaggaaagaaaagaaagaaagaaagaaaggaaaagaaagaaaagaaagaaagaaaggaaagaaagaaaggaagaaaagaaggaaagaaaggaagaaaaggaaagaaagagagaaagagaaagagaaagagagaaagagagaaagggagaaaggaaggaagggagggagggagggagggaggggaaaagaaaggaaagaaaagaaagaaacgtaagaaagaagaaaaaaattattaattagtcttaaaacacttgctgtcgccagggaaaggtgatgtttccagggatggccacaaggtggtggagtggtacccatgcccaaagtctggtgggcagttgcccattttacagtattgggagctgggaaaagaccctcagaacccaggcacctcccagagactctgtgagggtttgggcaaagggtagcttcaagtcattaggaatctgcctctgggtccttggctccgggatgtcttgtatgcaaagaggatggggtgaagttgtggggtcgaggttaggtgaagtggggtcaggacagtggggactgtcgcaccatccccaaagtgaagactttaattttttaattttaattattttatttatttatttatttatttatttatctatttatttattgagatggagtttcgctcttgttgcccaggctggattgcaatggcacgatcttggctcactgcaacctccgcctcccgggttcatgccattctcctgcctcagcctcccgagtagctgggattacaggcacccgccaccatgcctggctaatttttgtatttttagtagagacggtgtttcaccatgttggccaggctggtctcgaactcctgacctcaggtgatacgcctgcctcggcctcccaaagtgctgggattacaggcgagagctactgcccccggactccaagtggggactttctggcctgaaaccctcctccccatttcacttggcagtacgaggagcgagtgctgaaaaaaatccgccggaaaatccggaacaagcagtcggcgcaagaaagcaggaagaagaagaaggaatatatcgatggcctggagactcggtgggtagtgctggacccagactctacactcgtggaggaaactgaggcccagagagaaggagatgtggctaaggccacacagcttagagtctgacaaaattggaggtgattctcctctctgggagagatcatgcttcttactgattgcagggatggaaagatgcctagtgatggtgtaggacaagggtttgggggaccctttgccccctagaaggtgtgcggaaaaaggacaaagtgtgacccatcctattctgaccctctgcctgaagatagacacttcctttttgtgtgtgtggaagggtctccttctatcacccaggctggagtgcagtggtgcgatcttggctcactgcaacctccacctcccgggttcaagcgattctcctgcctcagcctctccagaagctgggattacaggtgcatggccaccacgcccagctaatttctttgtatttttggtagagatggggtttcactgtgttgcccaggctagtctcaaactcctgacctcaggtgatctggccgcctcagcctcccaaagtgctgggattacaggcgtgagccactgcgcctggtctctcccctttcttaaatgcaatctgctaagctcctgatcatctttatccagggtcattccccccaccaccctatgtcctgggtaattgtatcccattttacagacacaaaagctgagatcagagagtggagtggcccaaggtcatggggagagggagagatgaaacttgaatctcggccgggcgccgtggctcacacttgtaatcccagcactttgggaggctgaggcaggcggatcacgagttcaggagatcgagaccacggtgaaactctgtctttacaaaaaatccaaaaaaattaactgggcttggtggcgggtgcctgtagtcccagctactcgggaggctgaggcaggagaatggcgtgaacccagaaggcagagcttgcagtgagtcgagattgtgccactgcattccagcctgggcgacagagcgagactccatctcaaaaaacaaacaaacaaaaaaagaaacttgagtctcccaggatgcctggttgtcctgatatttcatcttctggaaacatcactgcctgaatctaggaggctcagcttttttttttttttttttttttttgacacagagtttcattcttgttgcccaggctggagtgcaatggtgcgatcttgactcactgcaacctccacttcccgggttcaatcgattctcctgccttagcctcccaagttcccaagtagctggaattataggcgcccaccaccacacctggctaattttgcatttttagtacaggcagggtttcaccatgttggccaggctggtcttgaactcctgacctcaggtgatccgcccaccacggcctcccaaagtgctgggattacaggtgtgaaccaccacacccatccagggggctcagctttgaatgaagccccctccatattaatgcagaaatgggacctaggaaccaggcagatgtgggttcaaatcccagccctgtctgacctgccgagtaaccttggatgaatgacttcccctctctggccttgggttctcttggcttgtaacgtgaggcctctgggggagatgtcagtggggccagctggtgactggcatatgctgaatgtcgatgcgtcttcctcctttcaggatgtcagcttgcactgctcagaatcaggagttacagaggaaagtcttgcatctcgagaagcaaaacctgtgagtctgggtccagctggggcagaggacaggggaagcagccccagagtccctttgcaggaagagcagagagcccatgtgatggcagaatgacatagggaataagagttttacctatgggccgcgtgcagtggctcacgcctgtaatctcagcactttgggaggccgaggcgggtggatcacctgaggtcaggagttcaaaaccagcctggccaacatggtgaaaccccgtctctactaaaaatacaaaaaaattagccaggcgtggtggcgggcacctgcagtcccagctactcgagaggctgaggcaggagaattgcttgaactcgggaggcggaggttgccgtgagccgagatcgcaccactgcactccagcctgggtgacagagcaaggctctgtctcaaaaataaataaataaggcctggtgtggtggctcacgcctgtaatcccagcactttgggaggctgaggtgggcggatcacaaggtcgggagatcaagaccatcctggctaacacggtgaaaccccgtctctactaaaaatacaaaaaaaattagctgggtgtggtggtgggcgcctgtagtcccagctactcgggaggctgaggcaggagaatggtgtgaacctgggaggcggagcttgcagtgagctgccatcccaccactcactccagcctgggcgatggagcaagactctgtctcaaaataaataaataaataaataaacaaataaataaataaataaaataaataataaagagccagaggcccttgaagaatggatggaatttggactttagcggggctgggggaccccggaaatggacgagaagcagaaccgaggccctttagggctcagcggaggcctgcctgtctctctaaggtccctcttggagcaactgaagaaactccaggccattgtggtgcagtccaccagcaagtcagcccagacaggcacctgtgtcgcagtgagtcctggtgcccccaggcaagccggggacctaggcttctgtagaggggcccatagggaggtgacaatgagtccaagctctccttgtgccccagctcaagtatgatccagtctggtctttggggcctcagtttccctgcctgtgggatggagatgcttgcaggggaggggagggagggggtgactctgccgctgtctccaccaggtcctgttgctgtcctttgccctcatcatcctcccctccatcagcccttttggccccaacaaaaccgagagccctggggactttgcgcctgtacgaggtaggggatccccacctttgaaacccttgtctggtctccccaagtccccgtcctgggcctctgggggagggggagaagacccctgtgcccttgttccctgaggctgggggccagggaagggagcataggaccccacctccaccttgtcccctgtgatgccccccttccccaatcagtgttctccagaactttgcacaacgatgctgcctcccgcgtggctgctgatgctgtgccaggctccgaggccccaggaccccgacccgaggctgacacaacccgagaagagtctccaggaagccccggggcagactggggcttccaggacaccgcgaacctgaccaattcgacggaggagctggacaacgccaccctggtcctgaggaatgcaacagaggggctgggccaggtcgccctgctggactgggtggcgcctgggccgagcactggctcaggacgtgcagggctggaggcggcgggagacgagctgtgagccccgccaggactatgctcccaggcccctctgcccaggggtgccttggggatgctgcactgggcagctacccacctggggatgggacgtgaggccaagaccccagcagagatgccagaatgggggaggcacagctcatagccacacacccagggcctgactgaggcccacgcaggaaccgacactcagacacaaggcaaagagggccacaggacccgggaaatacacacagagccaggagcagaagcaaagagcagacacacatacagcctgaaacagacctggacagacagacacagcctgaaacagacccggacagacagacacagcctgaaacagacccagacaaacagacagacagacacagcctgaaacagacccagacagacagacagacagcctgaaacagacccagacacagcctgaaacagatccggacagacagacagaaacagcctgaaacagacccagacagacagacagacacagcctgaaacagacccggacagacagacagacacagcctgaaacagacccggacagacagacagacacagcctgaaacagacccggacagacagacagacacagcctgaaacagacctagacagacagacacagattgaaacagacccagacaaacagacagacacagcctgaaacagacccagacacagcctgaaacagacccggacagacagacagacacagcctgaaacagacccagacagacagacagacacagcctgaaacagacccagacagacagaccgacgcagcctgaaagagacccagacagagagacaggcagacacagcctaaaacagacctggacagacaggcagacgtagtctgaaacagacctgaacagacagacagacgcacacacacaacagatgcgcagcaactccccgcccagggacccctcccggcctccctcgcacactgggaggaggaagccgccgagactgcagggagcctggccccggagccccgggtgcgccctggtctttggagcagccacggcccacaatcaccccccttttctaagactgcctgatccgaaataaagtattttgacagaaccttgttttggtgtggaggcggagtctggggctcctcgactccccagaaggaggggctgggccagcctgggatgggtgagtgaggtgtgggctccacacccccgccagatgcccgcgctggagcagcggagggagaggcgccgggcacgacttcagcaccttggagagcggcggcgggcggagtgcggggaggcaggcgtggcgcttccaaggtgtcccctccggagttgcggggaaggcagctgccttcccggggatctgggcggcccaccctgctcattttgcgggcgaggacaccgaggcgtcggaagtggagggactgcctaaggtcacagctggggagagtggaacccggctgctcctgcgctcgtctgtggggtcgcccccactgcgggctgtgcgcgcctgcccgggcgccatcgcaaaatcgcgcccaaagcacaggtggggactcatagcctgggggtaaatgttaaacaacaacaaaaagcatgtgcataagtgtataactacaaactgagtgctcagaaaatgccagctgccttattggcttcatcatcagaaaactggcctgatccctccagaggcggggtggggggagaggtgagcccttgttcctcggcccccaggcttgaggggcagggattgcaacggagcccaagcagctggtccagggaggaggggaccacgaactcctgacccaggggggcgaggacctgccacaaatagggaatttaaacactcactgggcacagtggctcacgcccgttaagtccagcactttgggaggccaaggtggcctgactgcttgagcccaggagtttgagaccagcctgagtcacatagtgagacccccatctctacaaaaaatgcaaacaattagctgggtgtggtggcacacacctataatcccagctactctggaggctgaggcaggagaattgcttgaacctaggaggcagaggctgcagtgagctgagatcacgccactgcattccagccttggtgacagagtgagactctggctcaataaaataaagtaaacacactgagatgcaagaaagaaattgtttttattgcattgaggacttttccagaagcctggtggacccacgtctccctccagccccaaaggcagtgcaagcctctactgatcccccacttcaaggtgggtctcccctcctgcagggcccatggaggaggggtagggtgggctgtagggggcccagaagggaggccctggggacagagggagttcactcctgtttaagctggagaccagggagggcccagcctcacctctggacaacacagcaagtcagaggctggggtgtggcaggggctcacctgtcacctctggggtgtggcttcttcccggaaccgcaccagaggcccctggagcccagggagggaccacggagggcaggtgtaacccctggcctggagcacagctctcagagccctgaggctcccggggacagaaacaagtaacaaagtgagaccacgagagaaaaagaatccacagtttctacaaaaagccccaccctccccaagcaccctggtcagctggggaccgccttggccttcacccttttggggggtctgtggggggcagggctggtgggccgctcccgtttggggctggcgggctctgagccgttgtgctgggcgcagggctcctgcttggggccggcggggatagagccgttgatccgggtgggagattcctccttgggctccagcttgggggtgggcgggcggggcaggggtggcagcgccctctccagcacacgggggccgtcccaggcggggatctccagccccaggtgcttcatgagccgggtcatgacctcgtcaacgtagccatggatgcggaggtcagcatggcggtcctgccgaggggcgggacgggtcaggcgtgggggacagagggtgcatggtggccctgggcaggggtaggctcagacacctacgtgcttggtgggctgcaggttgacgatgaccaggcggcctccccggcgcttggtagccagcggcaggttcccgctgggccggatctgcagcgatgtacccagcgtgatggacaggtcggcgttcctggggccggggagcgtgggctgagcctgatgccctgctcctgccaacatcccgagccagccctgggggccggttcacacctaggccatctgtgctcaccggggcggtcaaggccagccccactcccgagtcagcctttgggatcccgccctgccctcctctgcggtccgttggcggggtcattgatctgggcgggcccttagacacttccggggagtatcacagtgtggtaagagcttggacacctagggtgggaccctggctcggtcacctcccggctgggcagcactggatagaggagacacctggcggaagccttggtttccttgtgtagcacccacccagagccatgaggtgacgagtgtgtgtgagtgcgtgtgtgcagcccctggcctggcccacctgctccaggaagcctcccctcactgcctgtgagcctcagccactgtcccatgctggagctggctgtgtttctgctgtcgtcccgccccgccccaccatgggctccctgggggtggggggtcagacctgctggcctcatcggcgagtgccaggtcccggtcgggcagggagtcctcccagtctaggatggtgtccctcagctctcccctgcaatgaggaagctgaggagagtcctcaggggcctcgcagcctcccctggagcccagggcatgggtgggggtggctcacctgcaggctcgcagcccccttgccttagccacggtgcagagccggcccgtggccttcaggcccatggtgcccacgactgtgtctcggacgtactgcctgtgtcagggaggaagggggaggatgggaccaggtgagctcccatgggtgactctcgcactgtttctagggtgacgttctcccagggaggtggggggtggacaggtgaccagaactagcacccagcgacacggaacgagtagccttccatgaataacgggctgggatgctgctcggtgcccggagcacagaaaacaaagcaggaaactgtcccagacagacgaaggggctcgagagacaagacccagcatgggatcccggaccaggagaaacaggaacaattggagcatgggggcgacaggccgagtctggattcgggattagagaaggcgatgtccactttacttttcctgactttaatcgttatactgggccgggcgtggtggctcacgcctgtcatcccagcactttgggaggctgaggcgggcagatcacaaggtcaggagttcgacaccagcctggccaatatggtgaaaccccgtctctactaaaaatacaaatattagccaggtgtggtggcgggcgcctgcagttgcagctacttggatggctgaggcagaataattgcctgaacccgggaggcggaggttgcagtgagccgagattgccccactgtactccagcctggatgacagagcgggactgtctcaaaaaaaaggagaaacacagagataagaaggcccctgtggctgtaggtccaggaccaccaagggtggctggctgccaccagcagccaggaaaaggcaggaaaaatcctcccctacaggttgcagaggggcatggccctgcagacacctggattttggacttctggtccccagaactgtgagatcacaaatttctattgttctacgctgctcatctgtggcaggttgctacagcagtgccaggacacggatgtaccccccacaggagggaggcacggcccccccaaatccctccaggaggaagacatgccccccaaatccctccaggagggagacatactccttatatccccccaagagggagacacgcccccagatccccccaggagggccacaccccagtccccccataccctctgggtctctgggacatcggattcgacccccaaccccctctggcagagcccccacccctgcacccaggtggcactcacgtcttacacttggcacattcttccacaaacatgttcccgtggagctctgccagtttgtccctgtgggaagagcaggaagaggcttgatggtgggaaaggatccctggatgcccaggctttggagctggtgctaagcccctctcctccaggaaggcttcccggactcctctcccacaacattgatcaactccttctttctggctcttctagctcctggctccaccattcatctgctgtgcatctctgggcaagtggaccaacctctctgagcccaaggaatcattaacccccaaggctgaacccaccttagataacgggaagccctttccactcacaaaatgcccgtccccctccgagagcatatgggaacctcttgatgtcaccaggtcagaagcacaggaattcaaattcccagtttataatggaagaaaccgagacattgaatggccctgaagcatgagatccaatcccagctttattttatttatttatttattttgagacagagttttgctcttgttgcccaggttggagtgcaatggtgcaatctcagctcaccacaacctcaatggcacaatctcagctcaccacaacctctgcctccggggttcaagtgattctcctgcctcagcctcctgagtagctgggactacaggcgcccgccaccacgccgggctaattttttgtatttttagtagagacagggtttcaccgtgttagccaggatggtctcgatctcctgagcttgtgatccacccgcctcggcctcccaaagtgccgggattacaggcgtgagccactgtacccagcctaatttttctgtttttagtagagacggggttttaccatgtggccgggatggtctcgatctcctgacctcatgatccgcccgccttggcctcccaaagtgctgagattccaggcataagtcaccacacctgaccctcctttgcttttttttttttcaagacagagtcttgctctgtcacccaagctggagtgcagtggcgccatctcggctcactgcaacctctgcctcccgggttcaagcgattctcctgactcagcctcccgagtagctgggattacaggcatgcgccaccacgcccagctaatttttgtactcttagtagagatggggtttcaacatgttggccaggctggtctcgaactcttgacctcgtgatccgcctgcctcggcctcccaaagtgctgggattacagatgtgagccaccatgcccggcccctcgtttgcttttataagcagagaaaaatctcttcctcacccctcacccctggctgccgagctcctcgtctcaacaactgacctggctgtcattggttgccccaggggtgagacctggcaaagaggggcaggggagggccacacttttattgggaaatcagcctgccccagagcacaggttcacttcagtgtcagacacgtttagtgtcagattaataaagatggatattaaaaacacaacaggccaagcgtggtggctcacacctgtaaccccagcactttgggaggctgaggcgggcagatcacctgaggtcaggagttcaagaccagcctggccaacatggagaaaccccgtctctactaaaaatacaaaattagctgggtgtgatggcgcatgcctgtaatcccagttactagggaggctgaggcaggagaatcgcttgaacctgggaggctgagcggagatcacgccattgcactccagcctgggcaacaagaacgaaactcggtctcaaaaacaacaacaacaacaaaaaacaaactgcaacttctagaccctgacagctctcctccccttagccccatctcgagggaaattctgcctctggcctcagccgggacagctctgagccatgggactcagagatctccacacactgggccaagaactcagggctagaatcttatagaaccaggaaaaggggactctccccctaaaaatgcaaacacggtttgtggggccccaagctcttttgtgggggcggggccagggtgttacctggggaagcctgagcgcacatggagcccgtccacgttctggctgaccaggaagcggaggaggcccacgcgctccagctgcaccagcgccatgtgggtctgcgtgggccgcgcgctctcaaaggtggtgtcgaacttgggggccagacctcgctcctccatggtccagactccgtggggacccctgaaggtggcaggccgggagagatggacggggagaggggaacagaaaaagagacagagggagaatcagagaggtatagagagaaagttggagagagagaaaatcaggagacagagagagacagggagacagagagagggaatcagaaacagaaatagagggtgagttgcaagaacagggagagggggatagaacaagacacagacagagagataaagagttaaagacaaagcaagtcagagacagaattggagagagacagagagagggagaggcagagagagagagatgaattcacacgaaggcaaaaatgacttattctattcaaccaacactgctgctgcaatgagcccgacgatgctcacatgggcccaagccctgccctccagaagcccttgatcttgggggagacaggtggacacagatcctctggccccaagagtcaagcctggatcagaggaggtacctgggcctggggaagccccgtggaggtgggggccctggggcacgtggaagggcttcctggaggaggctaagcagtttcttgaagggtgagagggaagatcagacagaaggggtaaacaaaggcctgggtgctgggaagagcccatgagtttaggagaaaatgcaagtgttttgggggctgcagcaggagcaggaggggctgaagttggagaggtgattcagggctggggcaggaagggcttcagcttccagcacaaggtattcagaactctacactgcctggcaatggggagccacagcaggttatggaagaggagaaggaggagaaattcacgccttggctttttttttttttttttttttttttttttgagatggagtctggctctgttgcccaggctggagtacaatggcatgatcctggctgactgcaacctctgcctcccgggttcaagcgattctcccacctcggccttccaagtagctgcgattacaggtgcctgccaccacacctggctacgcttgcaaatatgaaagactacatttcccagcaacccttgcagccaggtgtgatcaggtgaccgtgttctggccaatgaggtgagtggaatgctggttgtgacaagggacacatctttttgttttgtttttagacggagcctcactctgtcgcccaggctggagtgcagtggtgcaatctcggctcactgcctccacctcccaggttcaagcaattctcctgcctcagcctcccgagtagctgggactacagatgtgtgccaccacaactggctaatttttgtatttttagtagagacagggattcaccatattggccaggctggtctggaattcttgaccttgtgatccaccatgcccagccaagggacacatcttaaagggagtacccaggacacatccaggaggaaagcagatggatgtgttctcattcccagatgtgtgtggctcgcagggaagcctctggcagcctggtaggccttgcctcgacttcccctgcacaatcacagacctgaagtcggggatgccagaggcagtgctgatgccggcacccgtgtggaacaccacactggaagactgccagaccagcctcgccagttcccacaccttccgctccagctcctccggggggtcgaagatctgtggggggagagagcagacggaggggtcaaaacagttcccccaagtggcaaggccacgcacgagccacagactgagctgtccctgtcttgcctgagggaggaaaatggattggaaaaggcagcttgtcctcatgcccctcctcttcctacaaccttccatgcctcccacctgccttgtcaaagccctagcccttcccacggcccaccaggccctgcactacctcccttgccccctccctgccctcttctcctccctctccctgcctcactctgctccagccacacaggtctcctccttgttcctctatcacaccaggcacagtcccgcctcagggccacaccctttaatgctcttcccccagatacccacatggctccctccctcacctcctgtaacttgtggcttagatgtcacttcagtgacagtgatgcctcccttggccaactggtttccatgcaacccctagtcagtctcccttactagaaggaggggtttttaatctgtgttgctcctggctgtggccttagtacctagaaagtgcctgagctacagtaagtgctctataaatgttggtggaataaagtgactaacaggccgggtatggtggctcacgcctataatcccagcactttgggaagccaaggtgggtggatcacttgagatcaagagttcaagagcagactggccaacatggtgaaaccccgcctctactaaaaatacaaaaattagccaggcgtggtggcaggtgcctgtagtctcatctactctactcaggaggctgaggcaggagaatcgcttgaacctaggaggcggaggttgcagtgagccgagatcgcgccactgcactccagcctgggcgacagagaaactccatctcaaaaatataataataataataataaagtgactaacagcagcagtgaagagtggggcttctggacgggcgcacaccatcagcgctcattaaatgcatgagtcagaatgcatgggccagccttatggaatggggccatcttcacctcgtttgcagaaagtttggagatggagacccaaaagggaagtgacttccccaaagtcccacagtgcgtggagggggcagccgatccctccacttcccctctgagtggctggagggatctttctggcacattctgtccagtcccctcgccagggcaaaacccttccccatcaccctcaggataaagtgccaactccccagcctggcatttgagccccgtcctggcccggctctggaaacctcccaggcctaatcgttctccaggtgtgtttattcccacctccctttgcgcctgtcgtcccctcttcctggaactacatcccctctctccccgatcagccccgacagggtgaccacagagttgggcgtgttggcgtcccccggcgcgcaggggcgtcacttcccgccccttcctcactgggaagtccctcccattgtctagcctcagtgccccctgatattcccacaatgcccccctgccatccggccgctcccagcccgcggccctggggcgcgatgctcgggaccctcagacgcgctcacctccgggaggccgcacttgcccttgtccgcgtacggcgacagccccgccgcgtaattcaccgacatcctcgactgccccacgggaacaataaagtttcccttgttgaggccgcttccgccggaagcggggcggggcggggaagaaggaggaaccgcgttccagtcctgcgcacccggcctcccacggcaaggcgcatgcgcctcttgctgacgccgcaggcgacatgttatctgctgtcagaaggaagcctgcctctttgcatgcaggtgtttgcggggcttgggaaggggctccccgatgacccgggcgggaaattggggcggccgcctacgtgagagttctccagtcacctctaaaatgcgggacacaggctatccatgtccccacaaccccttttacggattagtaaattccgtaaggacagagccggacagcagggaccccagcctaagggttttgaatgccacgcagagttacctgaatatctcatttgtgtgtgtgtgtgtgtgtgtgtgtgtgtgtgtgacggagcctcgctctgttgcccaggctggagtgcagtggcgcaatctcggttcactgcaacctccgcctcttgggttcaagcgattctcctgcctcagcctccctagtagctgggattacaggcgcccgccaccacacccagcaaatttttgtattttttagtagagacggggtttctccatgttggtcaggctggtcccgaactcctgacctcaggtgatctgaccgcctcggcctcccaaagtgctgggattacaggcgtgagccactgcgtccggccaagttatctgagtatcatccaactggaggttctgcattctgcaggacaggtcctgctcaaggtcaatggggctggtggcctggaggactcatttaagaatcatgtgttgagtacctactttgtactgggcacactggagagcaaaggtggtaccatctatgccctggtggctgcgggtggacacaaacatgtgaccaggtaatggtgacatggtgtggttggggtgcaatgggtgatgcagagggcacagggcagtgagggggctcacaggaggcacctgacccaggctgggggcatccgggagggcttcctggaggaggggatgttgcagcaaagatctaaaaagtgagtgagccgggcgcagtggctcacacctgtaatcccagcactttgggaggccaaggcaggtggatcacctgagattgggagttcgagaccaccctgaccaacatggagaaaccccgtctctactaaaaatacaaaattagctgggtgtggtggcctgtaatcgcagctgctcgggaggctgaggcaggagaattgcttgaacccaggaggcggagattgcggtgagccggagatcgcgccattgcactccagcctgggcaacaagcatgaaactccgtctcaaaaataaataaataaataaataaagagtgcatgagtcaggtagagccggttggggtgacatgaagtacagaaagaatgttcctggtggggggaacagcaagtgcaaaggctgagaaagaggaagagcatggctccttccagaaactgaaatcagtccagtgatgatagggaagatcgtgggtgtcttcccgccagagccagttggccaacaggcagtccgctgccagcctgtctcctccctcggctcatccccggccccctggggcggccgcctgctcagagccgatcaggtgtcagagtggagcggctggagctgctcgtggcccagctgggagtgggtaaccggagccggcagtgggcactgtggccgggagctcggggcactggagctgcaggaggtaggggaggaaggaggtgggagaggcccaggacggaggatccccttatggccccaggcccctgagcccttgtatgtgggagaaagaagccgtgctgagtcctagccaggctgcggagctacccaggtaccctgacacacacatgcactcgttcacccacgcacttcccacttgccggcctgtgccctgcctagcttcctccaaggcaggtgctcaacatcccacccggccatcaggcccttcttatttaccatcacctcttccagcaagcagcttcctaaatttagcaggcgtttctccctcccccaagcccacggattgtcttctcccaagcagcctgtgaactcctctgttgggtgtcttattaccccctgctttgggtgtgattgaatcctccagtcagaggtagaagaaaaaagggtaggtagtgagtgaatgggcaccggtggaggggtagatgaatggatgggtgggtggatggatggggggcgaataggtggattggtggtttggtagatgggtgaatgggtagatgtatggatggatgggtggatggatgaatgggtgggtgattgggcaaatggatggagggatggataagtggatggatggatggatggaaggatccatggatggactggtgggtgggtggatggatgcactggtgggtgggtgggtggatggatggattggtggttgggtgggtggatggagggatggataagtggatggatgagtggatgggtgggtgggtggatgggtggatgggtgtgtgattgggtgggcagatgggtggatggatggatgcttgggcagatggatggatgggtggttgggtggatggatgaagggatggataagtggatggatgggtggatgagtggatggatgaatggtgggagttggtaggtgtttgggtgggtggatggatgtgtgggtgaaatctgattaaagggtgatgaagaaccatgagaacatgaattgggtgggtgggtttgtgggtggtggccagtgggtggttatacagtgcttaggtgggaggatggatgtccaggtgagtgcataggtggtaaatgcgtggaagggtggcttggagaattcacgagtagataggtggacaggtagaggccatgccaacccctactccttggtaagaggcaaatacagattctccatcacagaaatccctttcacacatagggcctcacagtcacacccctcaaaaaacacaccccctcaagataggcctgcctgacctccgtgcctgcccatgcggaacgtagaacaggcccaggtggacagaagtgcacgtgtgcacacgccccacactcaacgtcacacacatgcatgcagccattgccccagacctccacccactatgggtgaattgctgtcacatggaggttccctctgactatgtagcaaacatgcctctgtgctgagagccgtcagccctggcttcagtccccagggagcccctgactgttgaaaaggacagaatcagcccagacccttccagcccatggagccaggggtgaggcagaggcagagacccagccagggtaggcgggaacccaatttggggagttagatctctgcttgggaacaagaggcaaagctgataagagcaagggattttggaactgggctttgaaggatgagtaggagttcagagaagaaaaaagaaaccattctaggcagaaataactgcacaggtaaaagttaggagaccagaaaaggcttgatctgtttggaccgcaggaaataccagtgagatgcatttatgaagcccctcatgtttggccaggctctgtgtagggaccatgctgaaaactgaccatgagttggtcaagaaaggatcatttctgtcactgtatagatgagggaagtaaaacagagagggcaagtaaactgccaaaggacacacagcaggtaggagatagagcaggtctgtgtcttgctctaggggccaggactggtcaggaaggaggaagcggtccttttgaggagggcgaggcaacggaccctgccgcccaccaggactggtgtccctcaccttacccccacccttgccctcctcaggtggcctgtggagaggagaaacacagggcaccaactatgaagactctcagggcgcgatttaagaagacagaggtgagtgtgaggccctagatgcccgatacacccctgcaacttcagccttctgtctcctggggcttggctgaagatccaccctttcattccagtacccacctcttctcctttcctctctgctgccccctagcgtcatgacctccccactgctccccgtacaagctttccagcccaggcctttacccaggccctagtccgctctccatggaattccttctcgccgcattgccaccaatcagaccctcctaattcctcacaatttggccccagtaccacctccccgtccaatctccgctctccccggccacagtaaccccttgcttttccaaggacccactttcccgaggatcctgatcttttgctttggtgtgtgtgtactcagcacatatttatatagcaggcgctgttccaggcacaggggaatcagccagggaatagggcaggcaaaaatccttgccctcgtggagccgaccgctgagtacgggagatgaacacgaaacaagataaataagtgacaatgtgtattttgtgtcgcaaagacagacaaagcaggaaaagggaattgaagcattcagggcaggggaggtggctgcagttttaaagagggtggccagggaaggcttcccagaggaggtggtattaaagcaaagattagaaagggaaggggagggctgggcgtggtggctcacacctgtaatcccagcattttgggaggccaaggcaggcagatcacgtgaggtcaggagttcaagacgagcctggccaacatggtgaaacgttgtctctactaaaaatacaaaaattagctgggcacggtggcgggcacctgtaatcccagctacttgggaggctgaggcaggagaattgcttgaacctgggaggtggaggttgcagtgagctgagattgtgccattgcactgcagcctgggcaacagagtgagactccatctcaaaaaagaaaaaaaaaagaaaaagggaaggggagtgggggagagagtttgcaggaattgcattccaagtggctggaacagccagtgcaaaggccctgaggtagatccagctgtcttctcttgcatccgtgtctttggctatgaactcctagaaagacatgcttcttcctccattgtccccattcttctcagccccctcaagtccctgtggcggccaattcagggcacagatggggaggatgaaagggagggctcacctccagggacaggcaatcagccttcctgagcacctctttgtgcctggcctgggtgggcaagcttgacttggagcctttagttttcgtatcatgggatacaacatccccatctggtgtggcctggagaaatcagggagtctgcctggaggaggtggcaccggagcagagcctggaagaatagggaggatttagagaagtgaaggcaggcacgtgaggagcggggcacggacctgtgtgggtaaagattcggaggctggaccaggtctgcttgatgcacaggcataacaggcagattctcttggcaggagcagagagtgcgagtgagtgggagctcaggatctttgaaagccatttttgaaaagccaaaaagagaggcctgtggaacaagcctggatttcattttttattttattttattttatttttgagatggagtttccctcttgtcgcccaggctggagtgccgtggcttgatctcggctcactgcaacctccacctcccgggttcaagtaattttcttgcctcagcctcccgagtagctgggattacaggcacgcaccaccatgcccagctaattttgtatttttagtagaggcaggacttcaccatgttggccaggccggtcttgaactcctgacctcaggtcatccacccgccttggcctcccaaaatgctgggattacaggcatgagccaccacgcttggtccatttttttttttttttttttttttgagacagagtctctttctgtcacccaggctggagtgcagtggtgctatctcaaccgactacagcctccaactcctgggctcaaacgatcctcctgcctcagcctcccaaagtgcagagactataggcgtgcaccaccacactgggctaatttttattttttgtacagatggggtgtagctgtgttgcccaggctggtcttaaactcctggcctcaagcgatcctcctaactcccacccagagtgatgggattacaggcgtgagccactgcgcccagccaagcctgggatagaatcaggtggctctgagttcaaatccttcctctgtccctggtgtcctgggtgactctggggatgtcatgccccctctgtggcttccttcagttgtttgggctcatttgatttgatttgatttcatttatttttgagacagagtctcactctgttgctgaggctggaatgcagtggcacgatctctgctcactgcaacctctgcctcctgagttcaagcaattctcctgcctcagccttccaaatagctgggactacaggcgcctgccactatggctggctaaatattttgtatttttagtagagacagggtttcactatgttggtcaggctggtctcgagcttccgacctcaggtgatttgcccgcctcagcctcccaaagtgctggaattacaggcgtgagccactgcactccgcccattttattttgtttttaaactatttattaattatcatgtacccattcatttcattattcatttttattttatttaaaacattttaatttaatatcattggattcactttattttttttaatttttctttcttcttttttttttttttttttttttgaaggagtctcactctgttgctcaggctggagtgcagtgttgtgatcttggctcactgcaagctccacttcctggattcaagctattcttttcttatgccgcagcctcccaagtaggtgggactacaggcacgcactaccacgcccagcaattttttttgtatttttagtagagatgggtttcaccatgttggccaggctggtctcaaactcctgacttcaagtgatccacccaccttggccttccaaagggttgccattataggcatgagccaccatgcccggccctaagtttttttttttaagagatggggtctcactatgttgtccaggctggtctcaaactcctgggctcaagagatcctcccgcttcagccaagtagctgggactacagatgtgcagtactgtgcccggcttatttattttcatttttgttgatttttgagcactataaaaaatataagatgtgctttgcaggtgtcagctcatttaatcctcaccaccgtgttatgaggcaggagcttttattatcttcattttatagatgagggagggaagcccagagaggttaagacacctgctcaaggtcacacagctaggaagtgagacacaagccttcccccagggctgcgttactatgaacatgattggcctggaggtgggaggggagtgcattgattgaaaagagaatgggtggagacagacagcgggagagaaagaggtgaaaaacggtccattaactgcctacaaaatgtggcattgggtgagcttcattcactgtggagtgatcctaaaatttttcttcccacgtggactcaattcctcgatgatagttgacccttgaacaattacagcccaccctcctgcacagtcaaaaatccatgtataggctgggcgtggtggctcacatctgtaatcccagcactttggaaggccgaggtgggtgggtcacgaggtcaggagatcgaggccatcctcattaacacggtgaaaccccgtctctactaaaaatacaaaaaatcagccgggcgtggtggcgggcgcctgtagtcccagctactcgggaggctgaggcatgaacctgggaggtggagcttgcagtgagccgagatggagccattgcactccagcctgggcaacagagcgagactccgtctcgaaaaaaaaaaaaaaatctggctcggcatggtggctcacgtctgtaatcccagcactttgagaggcagaggcgggcagatcacctgaggtcaggagttcgagaccagcctggccaacatggtgaaaccccctctctactaaaaatgcaaaaattagccaggcagccgggcatggtggtgggcacctgtaatcccagctactcaggaggctgaggaaggaaaatctcttgaacccaggaggcagaagttgcagtgagccgagatcacgccattgcacgattgcccagcctgggtgacagagcgagactccgtctcaaaaaacgaacaaaaaaatccatgtgtaagtggacctgggcattcaaacccatatttttcaggggtcaactcctgaatgctttttttccccaagcattcctcagaagtagtagccactggtaaaccaagccatatgattgcttaatttccaaagcatagttatatttaatatttaagtaaatctttcaagaagtgtgggtggctaaaaaagagatacctcattcgggatgtgggtgtgttttgatatgtttgcaatgggaggggtcgggacaaagtcaaaattggatggggacaggataggtgttaaaacctcagacgggtgtgagggcctctgagagtgtctggagctggaggggcctgaggttagcccatagcctgggctggaactgttgcagcagatgggaggcctggctgttgctgggaagctgcagggcctccatcctcccctcccagagcaccttgccatccatccctccacctgcccttctccagtttcgcagcaggcagccggagtcaagttcagcttttgttcagcagccccgagggaagaaagcaaacacccatgactgcaggggccaggcccccccctcctgtcactgggaccttgtgttccgtgtcttctagccactgctacccctctcctcctctccttagggcactctccggcctttcctggtccctaacaccggctttttcttatttatgtatttacttttattttattttctttcttttatttttatttatttatttatttatttttgggacagagtctcgctgtgttgccaggctggagtgcaatggcatgatctcggctcactgcaagctccgcctcccgggttcaagagattatcctctctcagcctcccgtgtagctgggattacaggtgcacgccaccacacctggctaatttttgtgtttttagtagagacggggtttcatcatgttggccaggttggtctcgaactcctgacctcagatgatccgcctgcctcagcctcccaaagtgctgggattacagacgtgaaccaccgtccccagcctatttatttatttattttgagacagagtcttgctctgttgcccaggctggagtgcagtggtgtgatcttggctcactgcaacctccgcctcccgggttcaagggattctcctgcctcagcctcccgagtagctgagattacaggtgcctatcaccacgtctagctaattttttttttttggtatttttaatagagatgggttttgccatgttggccaggctggtctcaaactactgacctccaatgagccatccgcctcagcctcccaaagtgctgggattacaggcgagagccactgtgcccaaccaacaccgtttctttctttggggtcccaacagttggcattgcttactctgatcccccttgggctgtccgtgggcctcagtgtttccatccataaaatgggagttacctggagctgttcacttggggcttcactgacctcctgcctttactttaggtttcaggaaaatctcccaagtgggaagattggggtttctagagagtcacagactccatacatcaatgcttcctggaaagtcctctttctctttctgtcttttttctttttatatttttattttttacttaagtatgcattttttttttttcagaggtgaggtcttaccacgttgcccaggctggtcttgaactcctggcctcaagcgatcctcccgccttagcctcccaaagtgctgggattacaggcgtgagccaccgcgcccggccaggcctcgtattttcatttttcaccgagccctgcaaaacctatagctggtcctgcatggaatacagcagtgactaagatagacaaaaatcactgcccctgaggaggtgacattctaagggagagatcaagaggaaacaagctgggcgcagtggctcacgcctgtaatcccagcactttaggagatcaagatgggaggatcacttaagcccaggagtttgagaccagcctgggcaacatagcaagaccccatctcttcaaaaaaaattcaaaaattagttgggtatggtggtgtgtgcctgtggtctccagttactcaggaggctgagatgggaggaccacttgagcccaggaggtcgaggctacagtgaatgatgattgtaccactgcactccagcctgggtgacagagcaagaccctgtcccaaaataaataaataaataaaaataaaaaatgagagtaaacagaatatttttaaaaaggtatgtagtatcttaggtggtgataagaggcctggcgcagtgactcacgcctgtaatcccagcactttgggaggccgaggtgagtggatcacttgaagtcaggaattcgagaccagcctggccaacacagcaaaaccccgtatctactaaaaaatacaaaaattagccaggcgtggtggtgggcacctgtaatcccagctactcaggagtctgaggcaggagaatcgcttgaatccgggaggcaggggttgcagtgagccgagatccctccactgcactccagtctgggcaatagagcgactccatcaaaaaaaaaaaaaaaaaagacaacaatgaaggaaaaatatagctaaagaaagggctgtcagagaagggctcttggaagaggcatctccaagagtggacagcagtaaagaaagcagccatgtgcacggtggggcaggtgctccaggcagaaggagctgcactggccaaggcttggaggtgggacccagctgtttgaaggacaagaaggaggctactatggcagcatggattacaccgagggaaatgtaaatggagatgatggcaggcgcggtggctcatgcctgtaatcccagcactttgggaggctgaggcgagcagatcacctgagatcaggagttcaagaccagcctgtcaacatggtgataccccgtctctactaaaaatacaaaaattagccaggcatggtggcgggtgcgtgtaatcccagatactcgggagactgaggcatgagaatcacttgaagccgggaggtggagtttgcagtgagcagagatcatgccactgtactccagcctgggcgacagagcgagactccgtcgggagggagggaggaaggaaggaaggaaggaaggaaggaaggaaggaaggaaggaaggaaaaactccatgaggtcaggggtcaggcactggcagagtggggctgctcagagaagggttagcaaattttttcttaaaaggccagaggattaatatttttggtttgtggtgcagaccagcctcagctctgccattgcagcctgagaatagcctttgactgtctacacttttttcttcatatcctgcatgtggcatccaacgatctacaaatgaatgggcagggcttggccccgaaaaaactttatttatggacactgaaatgtgaattgttttgttttgttttgttccgagatggagtctggctctgtcacccaggctggagtgctctcaggttactgcaacctcagcctcccactttcaagcgattctcctgcctcagactcccgagcagctgggattacaggcgtgcaccaccgtgcccagctaatttttgtattgttagtagagacggggtttcaccatgttggccaggctggtcttgaactcctgacttcaggcgatcagcccaccttggcctcccaaagtgctgagattgtaggcgtgaaccaccgcacctagccagaaatgtgaatttcatatcatttttcacgtgtcaggaaggatgattcttattttgcttttctctcccccctccaacgactcacacgtgtaaataccattctctacggaaacaggcagtgggcaggatctgggctgctgtgagcagtttgcattttaagctgagtgaggtctctggaggcttttgtgcaggagagatgagatctgatgcaggtttaggaagctgcctctggctgctgggggagaagggacaaggggacaaggtcagaggctgaagaagaaagatgcatcccagaggcagaacctgcagtgatggggctagactatggtggtggccgtggaaggggtgagaaggggcagaacaggacacagtgtgcagccagtgggcttggccggtggaccgagtgtggggcaagagagaggtgtcacggtgatgccagggcttggatgaagcctggagggctgacagtatccatggtacacacctcagtgggctccgaggggcatttgctctgattgattgattgatttttttcagatggagtctcgctgtgtctcccaggctggagtgcagtggtgcgatctcggcgtgagccaccgcgcccaggtttttgtttgtttgtttgtttgtttgtttttagagagggagtctcactctgtcacccaggttggagtgcagtggcacgacttctgctcactgcaagctccgcctcccgggtgcacgccattctcctgcctcagtctcccgagtagctgggactacaggcgcccaccaccacgcccggctaattttttgtatttttagtagagacggggttttgccacgttggtcaggctggtctcgaactccccatctcaggtgatctgcctgcctcagcctcccaaagtgctgggatgacaggcgtgagccaccatgcctggccatttgctctgatcttgtatggcatccaggaggacaagtgtaggagacagttggaaactgaagccctgagctgggagatccgtttcggtctcttctctggagaagctcagaggacctccccacccccaagggtggaaggagagaagagttccaaggacaccctccttcccaaatgcctgtcactttccattttcctgccttggttcccactcctccctcctcttgtccaaacatgtctaagagggccgggcgcagtggctcacgcctgtaatcccaacactttgagaggccaaggcaggtggatcacgaggtcagagttcaagaccagcctggccaacatgacaaaaccccgtctctactaaaatacaaaaattcgctaggcgtggtggcgtgtgcctgtaatcccagctactcgggaagctgaagcaggagaattgcttgaacccgggaggcagagcttgcagtgagccgagatcgcaccactgcactccagcctgggtggaagagcaagactccgtctcaaaagaaaaaaagtaaaagtctaagaataatcacggaccacaccgacgtgtaaatgctcaatgctcacccagccctaagccagtggtcaatgtgtcaatggagggacacttgccagtgttgggatatctgtggttgtcacaacttggagtgctcctggtgtggagtgggtggaggccagggatgctgctcggcaccctgcagtgcccaggacagccccattctagagaaagatccagcctcaaatgcccacagtgcttccttggtgcctgtcctattatctatctcatttaaccgttgagaaattgagagggagaatttcagagagggaaagcgattagctcaaggtcacacagcaaggatgatataaccaaacggaattcaagcccctgtcacctgtctgctgcgtcgttgctcttaaattctggctctggaagacctcggttttgttgttgttgttgttgttttagtttgtttgtttttgttgttgtttatttgttttgcagtggagtctcgctctgtcacccaggctggagtgcagtgacgcgatctcggcttactgcaacctctgcctccagggttcaagcgattctcctgcctcacttcctgagtagctgagattacaggcgcccgctaccacacctggctaatttttgcatttttagtagagacgaagtttcactatgttggccaagctgttctcgaactcctgacctcaggtgatctgcccgcctcggcctcccaaagttttgggattacaggcgtgagccaccgcgcctggcctccagggctccttctaaaatgccaattacctgcaagggtcttggctgtgccccagagtctccaggcctgcgaatgctgcgtggcatccagtgggcgctcaataaatgcttactgcttgaaggagcatctcccccaagtgttcatctgatgcatgtttgtggagcacctgccatgggccaggcactggggacgctacagtgacagaaaggaacccaaggcccctcctctaccggaggagccgtgggtcccaggagtggcggaaattgaccggaaatggctagagaatgtcagagctgcgccgggaccagctagctctttctgtgaggaacgagtcacagttttatggtgcgcttactgtatgctaggcactggtcgactgagtgctgccaggtagtaccttggcatcctcccggtaaccctccgcagtaggaactatttattatgaaacccattttacggaggaggaaggagaagtccaaaataggtaagtctgttggccctgtcatataggtaggaaaggctggggcaggggcggggtgctggattcaaattcaggtgtgtaggattgcagctccccagtggcgaatgaatgaatgaatgaacgaatgactgattgaatgaatgaatggatgaggcaatgagtgaatgaatgaacgaatgggcgtgccaatgaatgagcaaatgagtgtgggaatgaatgaatgaatgaatggtgcgggaatgaacaaatgaatgaatgggtggtgaacaaatgaatgggtgagtgaactaatgaatggatgaatgggtgagccaacaaatggatgaacaaatgagtgagttaatgaatgcaggaatgagtgaatgcaggaaggaatggtgtgggaatgaataagtgaatgggtcatataagaatgaatgaatgaacaaatgggtgagaccaatgaatgaatgaaagagtgagcaaataaatgggtgaacgaatgaacgagtaaatgaacgaatgaatgaatgaatgaatgggtgagcccgtgaatgggtgaacaaatgaatgagtgaatgaatgaaagggtgagcgaataaacaaatgggtgaaggaatgaacgagtgaatgaacgaatgaacaagcgaatgaatgaataagtgaatgaacgaatgggtgagtgaattaatgcatgaaagggtgagcgaataaacaaatgagtgaaggaatgaacgagtgggtgaacgaatgaacgagtgagtgaatgaatgaacgagtgaatgaacgaatgggtgagtgaacgaatgaatgaatgggcgggccggtgaatgaatgaacgaatgggcgaacgaatgaatgagtgaatgaatgaaagtgtgagtggcgagagccctgccggccgcgtggaggtgcgaggctgcggacgtcgcgggcccggaggcacctgcgcgcccttggccgactcggaggaggtggagatggacgcccgcgggtcccctggagatgcagccggcggcctgcgctggtgagggagccgggcccccggcgccgcgtcctcctcatcctccaggcgacaaggtcaggaggggccggggcggcgccccttccctcagcccccagcccccagccccctacctgggtcttcccattccatcccgtgggggagggggctggcgaggagggcaagggggagggggcggcaccagggagggcgggaccgggcgggcgggcggggcggggagctccggcagcgcccagccccgccctccggccgctccccgcggtccctccagaccctctggccgccgcctcctcttggaaccccgtgcgccccccgcgccccgcgccccggacgccatgaagcagctgtgtctgtgcgcagccgcctccttcgcggtagggcccggggagggggcgcaggagcgggcggggcgcgggtacctcctctcccctcccttccccgtccccggctgacctggaccacccccccattccagacccgggaaagatggtcggcggcggggggtgggggggaacagaggttggggcagcttttgggggaatggaagagacatttggggagacatgtggacacgttttggaagactctttgaaacaaatggggacatttaggaacatttagagggcattggggggtgcagttttgggaaaacattttggagacagatggggtcattgaggggacaacttggaagctattttgggagagccgattttgcgaagaggtaatgatttggagaacagtttgggagaacatttgagggatgtttttggaggatatttttgggacatgacggtatcattgggaaggatggttttacagaacacttcaggaatttgggggagacatttcgtaatgcatttcaggctatagtgttgaggggagaagcctcgggatgtttaggggacagtggtggcatttcagggcagttgtggataaacagggcagaggatggtcctgagaggcatttaaaggggacttttaggggttcagatgggactttggagggtagtttggaaaagactcatggatccatttgctgggggcgatgttgcaggggtggctttcactaagggatgaattgggggacaactttttttattgtacagagtgggtcttgctgtgttgcctaggctggtctcaaaattcctgggctcaaatgatcctcccacctcagcctcccaagcagctacaggcatgagccaccatgccccgctgatgatttttattttttgtagagacggggtcctactatggtgcccaggtttgtctcaaactcctaggctcaagcgatcctcccaccttggcctccccagatgctgggactacaggcgtgagcctccatgctcagcccaggggacaacgttttggaaatagatgccagggggctgctcaggggatgatgctggtggtgggcttttgttggacaactggggtgatgggcctgggggcagatgctgggggtcgcaggcttgggggacactgtctgaggaccccctcgcccaggaccacctccccctgcagctgcggctcagccccactgaccttggctcctgcccgccctgcggcccctgccccatcccgaagccggcagccagaggcaggcgccaggcaagtgcccaggggcaggtggtgagagcccggagcccctgtcgggggcgtggggaggggacagcagccaacactgccccacgcacttctgggcgtgccctgcagagtcaagactggggcaagagtgacgagaggctgctacaagccgtggaaaacaacgatgcacctcgggtggccgccctcatcgcccgcaaggggctggtgcccacgaagctagaccccgagggcaagtccgcgtgagtgcccgcgacccgggagtgagatggctgaggggtggcaaccttgcggctgaacccttgtctctcacctccaggttccacctggcggccatgcggggtgcggccagctgtctggaggtgatgatagctcatggcagcaatgtcatgagcgcggacggggcaggtactgccagctgggccccggggagggaggaggaactaagcccaggtgcccagcctgagggtccagccagaccctgctcccaggtctcaatgttccccgctgaaaaaaggggaggctccctctggtgctcctcccctgcccccagggagacacacaggggcatgttaggatggggtggccaaagatagagactgtggctggcaccgagcaaagccagtggacagcttgtggatggggagtgactaggattcaggtattggttcagttggatggggaagtagctggcatggggaagtagctggggcttgggggatagctgcaaagtttctggggttttgttgttttgtttttcttttttggggggagggacagggtctccctctgtcacccaggcttgagtgcagtggccatgatctcagctcactgcagtctccatttcctgggctcaagggatcccctccaacctcagcctcccaagtagctaggactataggcgcacaccaccatgcccagttaatttttctattcttagtagggatggggtctccctgtgttgcccaggccggtcttgaactcctgggctctaagtgatccttccacctcagactcccaaagtgctgagattataggtgtgagccaccatgccaagcctggggaagtttctagaaagtgactgaggcagaggaagaactggggcttgggagataactgggaccattggacgaactaagctttgaggtgcatctgggatataggagtatccgagataaaggaagtgactgaagggaactgcttggagtttggaggaggaactggattcatgggagtagctgagcttgcaaagtatctggggcaagagaataacaagtagagtttggggatatctgaggtatatgggatagctgggatctaggagtagctggagctgtgggagtagcttgagctcttggagtagctgggttacgaggagaacttgtatgtatgtatgacttaactggagacctggggggaataactgagataaaaatgtgtggccaaaaggagtagttggggctcaggaggcaactaggcatggggacacagtcaaatctgaagctttagggtcacaggcatggtgggcagggaatatggaatagctggggattcatggagcatcagacagggacagagttggcatttggaagaggaagggtatatggattggcaagaacatatacagcaactgtgggttgtgaagggcagagctgaaactttggtgtagtggaccctgtagagtatctggggacatggggagtagctgaggcaatagggcttgaggaataggtgggtgtggacagtcgctgagatgggattgtctggaatacagactagccatggcttagagagtctctgggtacagggaatagcatggttttgagaagtacctgatggccgggcaccatggctcatgtctgttaattccagcactttgggaggctgaggtgggaggatcgcacgagccaaggagttcaagacgagcttgggcaacatagcaagactcctgtctctacagaaaatacaaataaattagccagacatggtggcacttgcttgtagtcccagctactcggaaggctgagacaggaggatcgcttgagcctaggtgttcaagcctacagtgagctatgatcacactgcactctagcctgggccacagagcaagatcctttctgcagggaaaaaaggagagaaatactagggtttacggactttgctagactcagaaactcatcacaagtagttgacatggcttggggagcagctgggagctacttgaatagctggagctccagtaaatcttctttccttccccaggttacaatgccctccacctggccgccaaatacgggcacccacagtgcttgaagcaactactgcaggtcatttactgtcttatctcagctactcccttggcccctactactcctgagttccagcaattccttgaacccccagatgctctatgaatcctagatattccttggccccttttactccagaaccctagctactccctggataaccaggtactctcagaccatccacatgcttctcctatttaagatgtactcccaagccaggcgcggtggctcacgcctgtaatcccagcactttgggaggctgaggtcggtgaaatcgcctgaggtcaggagttcgagaccagcctggccaacacagtgaaaccccgtctctactaaaaatacaaaaaattagctgggagcggtggtgtgtgcctgtaatctcagctactagggaggctgaggcaggagaatcccttgaacttgggaggcggaggttgcagtgagccgagatcatgccattgcactccagcctgggcaacaagagcgaaacaccatctaaaatatatatatatactcccaatgccaggtatttcctgagctctgtttctccccaagccctgggtccttccttagccccagacactcccagagttcccagccactcctcaaattctcagctgcttctcagctctcagctattttcttttctcaccaattttcatgaaaatggagtcccttgggggccacggaagggtgaggctgaagtatagcagagcccagggtagggaaggcagtcctagagaaatcaggcagcaagaaggatggctccgcctcaaaggactcgccccatccccaggcttcctgcgtggtggacgtcgtggacagcagcgggtggactgccctacaccatgcaggtgggtgcagcccagccctgccctgaccccgaagcccagagggtgctagacttgggggttattctgcccagggccctagggacctgacctgctgtgaagcttcctgtctcctcctttctttctttctttttttttttttgagacggagtctcactctgttgcccaggctggagtgcagtggcaagatctcagctcactgtaacatccatctcccaggttcaagcaattttcctgcctcagcctcccgagtagctgggactagaggcacctgccaccacacctggctgatgttttgtatttttagtaaagacggggtttcaccatggtggccaggatggtctcgaactcctgacctcaggtgatccacccgccttggcctcccaaagtgctgggattacaggcgtgagccaccgctcctggccttccttttctttttatgagatagggtcttgctctgttgcccaggctgaagtacagtggggcaatcatggctcactgcatccttgacctcccgggttcaaacgatcctcctgcctcagactcccaagtagctgggaccacaggcgtgcaccaccatgcctggctaatattttaaatttatttgtagatacaggatcttgctatgttgcccaggctgatctcaaactcctgggctcaaatgatcctcccacctcggccactcaaagtgctggaattacaggcgtgagccacctcacctagcctcctcctttttttcttgacatagaatctccctctgtcgcccagggtggagtgcaatggcgcaatcttggctcactgcaacctccacctcccaggttcaagcaattctcctgccttagcctcctgagtagctgggactacagacctatgccacaacacccacctaaaatttttttgtatttttagtagagatggggtttcaccatgttggccaggctcatctcgaactcctgacctcaggtgatctgcccgcctcggcctcccaaagtgctgggattacaggcgtgagccaccgtgccggcccttctcccttttttttttttttttttttttttgaggtggagtctcgctctgtcacccaggctggagtgcagtggcgtgatctcggctcactgcaagctccgcctcccgggtccacgccattctcctgcctcagcctcccgagtagcggggactacaggcgcctgccaccatgcccggctaatttttttgtattttttagtagagacggggtttcactgtgttagccaggatggtcttgatctcctgacctcgtgatccgcctgctcggcctcccaaagtgctgggattacaggcgtgagccaccgtgccggcccttctccttttttattacctactgtgtgccaggcactggagcccatcataaatcccggttaccctttgaaccacaggctattagcccattgcacagatgaggcttgatgaggcttaatgaggctgtcacttgtccgcagcaggtaaatcgtagggaatccaggtcgtctgacctcaaggagcagtcgaatgtactcctgggctttgtgaggatgaggagaggtccctagggtttaatttcctttgtggagcccctaggagataccaggaaaaccatagctccaggcagctggtaccctcataatcacctaatccaaactccttcccagagggagggaaagggacccaccgacttgaaccagaactcagcccccgacctgtccgctgtccccgtgaaattcaggcatggctttcgctgacgactcaagaaacatctgttctttcggaaactcagaataaaatagggctttgggggttttagtcactgggtgagaattctctgcagttggagtatgctgccacctagtggcggcaatgcttctggtcacaatataggagtccgttggtttttgtcactcaacagttaactgagcactctgggaggcccaggcgggcagattagcagaggtcaggagttcgagaatagcctggccaacatggtgaaaccctgtctctactaataataaaaaattaaggccgggtgcagtggctcacgcctataatcccagcactttgggagcctgaggcgggcggatcatgaggtcaggagatcaagaccatcctggccaacacggtgaaaccctgtctctactaaacaatgcaaaaaattagccaggcatggaggcatgtgcctgtaatcccagctactcgggaggctgaggcaggagaattgcttaaacccggggagtggaggttgcatagagccgagatcatgcccctgcacagcccgggcaacagagcgagaccccatctcaaaaaaaccaaccaaccaacaacaacaacaaacagttattgagtacctactgtgtgtcaggcaccgttctacgtgttgtagataaggtttgcagcaatcaaaacctcatactgcctcagacatacagcaggtattcaaacagagtttgttgactgaaaaatggatttttgtgcttaatcagactggatgtcaacctgctggaattcatacccagggattccagagaccatgcccttgtgtcagctgcacagcctcctggggagcctccctgtttccactctggtcctgggcaaatggcagtaggagggatctcttaaaatataaatagacaggccaggcacagtggtgcacgcctgtaatcctagcactatgggagtcagaggtgggaggattgcttgagcccaggagtttgagaccagcctgggcaacatggcaaaaccccatctctactaaaaatataaaaattagccaggcgtgatggctcatgcctataatcccagctactcgggaggctgaggcaggagaatcgctggaaccggggaggcggaggttgcagtgagccaagatcacacccctgcactccagcgtgggtgcagagggagactccatctcaaaaaataaaaataggtcgggtgcggtggctcacgcctgtaatcccagcactttgggaggccgaggcgggtggatcacgagctcaggcaatcgagaccatcctggctaacacggtgaaaccccgtctctactaaaaatacaaaaaattagccgggtgtggtggcgggcgcctgtagtcccagctactcgggaggctgaggcaggagaatggcatgaacccgggaggtggaggttgcagtgagccgagatcgggccactgcactccagcctgggtgaccagagcaagactccgtctcaaaaataaataaataaataaataaataaataaataaataaaattaaataaatacataaacacataaacggggccgggcatggtggctgcagcctataatcccagcactttgggagccagaggcaggaggattgcttgaacctaggagtttgagaccagcctgggcaatatagtgacattccatttccataaaaaattaaaaaaaagaattagccaggagtggtggtgcacgcctacagtcccggcggcagattgcttgagcccaggagttcaagaaaagcctgggcaacgtagcaagaccctgtctctaaaaaaataaaataatataatataaaataaaataaaaattagccaggcacggttgcacatgccttgtagtgtgggtctcattcctgtaatcccagccccttgggaggccgaggcaggaggatcacttgagcccaggagttcgggaccagtctgggcaacacagcgagaccccgtctctacaaaaagtatagggaaccacagtgcttgggactggcagtcggcagacctagatcctagatctgactctgcctcttaccccagtgggtgaccactggcctggttgggcctcagttgctgcatctgtaaaatgcaaaacttgcctttgttacaaattcctcagggcacatgggaatttctcatgaaataaaggagcagggtcacacccaggcagaaagtgcccagaaaatgtcgaagtctcaccctacccctactcttcccccttttgtttgtcttcctttcttttcttggtttttgagacaagatctcactctgtcacccaggctggtttgcagtggtgccatcatggttcactgcagccttgaactcctgagctcaagcggtcctcccgcttcagctggggactccctagtagctggggccacagacacacaccaccacacccagataatgtttgcttttttttttttttttttgtagagacagggtctcactgtgttggcccaggttggtctcaaactccagaactcaagcgaacctcctgccttggcctcccaaggtgctgggattacagggttgagctaccgcaccggacaaccttttctcttttgcagcggctggtggctgtctctcctgctcagaggtgctctgctcctttaaggcacatctaaacccccaagatcgggtaagcttctgggatctcttcagggaagatgttatgcttgaggtatgctgccaccaagtggcagtatctcaggcaccctttgaaagtctgagaaagtttgaggtgaaactcaagggcagttatataggcttctgcacctcccgggggtcagtttctcatgccatcgcatccctcctcctccctaccagtcaggcgcaacacccctcattatagcagctcagatgtgtcacacagacctgtgccgtctcctactgcagcaaggggctgccgcgaacgatcaggacctgcaaggcaggtgagcatctcccctcccagccagtccaccctatgctgtgtgaccttcggcaagacttaacctaagtaagacgatctagccagcctcctcttcccagcctggcctgggtgctgaggtgggcatgggggcttgggggatgttctcatctcctcagtagccccctcccctggtaggacggccctgatgctggcctgtgagggggccagccccgaaacagtggaggtcctgctgcagggcggagcccagccgggcatcaccgatgcgctggggcaggacgcggctcactatggcgccctggcgggggacaaactcatcctgcaccttctgcaagaggcggcccagcgcccctccccacccagcggtatgcaagccccacctccccaatgcatttgcttcttggcagcttcttgtcactccccttctctttatcgtgaatagtttcaaggtacccccgattggctgcattctaggaggtcctagagcttacccaattctactcagaacagtttcaaggagccccagggcatttagagtagtctgggagggggtctgcttctgctttcctgggtcatctgtacagtaagaactttgcctgtcctaagaagggcaccccctgctgggcaaggtggctcatgcctgtaatcccagcactttgggaggccgaggtgggcgaatcacttgaggtcaggggttcaagaccagcttgaccaacatggtgaaaccctgtctccactaaaaatacaaaaattagctagacgtggttcaagcaattctcctgcctcaccttccagagtagctggaactccaggtgcctgccgcctaagtccctcacgcctggctaatttttgtatttttagtggagtcggggtttcgccacgttggccaggctggtctcaaactcctgaactcaggtgattcacccgccttggcctcccagaatgctaggattacaggcatgagtcaccccatccagcctatcctctctttttaacagtcccaagtccctctctcagcactctacccaagcgccagatttctaccttaaacgccctgattcttggggaaatcgggagccccctacaagtccctggggcccaccaatgcccttcctgggcctgggaacagaatgcctgaccctgcttccctctctccccagccctcacagaggatgattcaggcgaggcgtcatctcaggtatggacccctaagcagtgaaggagcccctcctccctgcatccacactaacttctcccctgccccaagctctgtgagaagagaaggaagttagacctgggaaaacctgtttggaaagaatgctaccttcagggtatgctgccaccaagtggcggcagtgtgctcagcctaactcccagaactgggtgagaatactggatggggccaaattatggggctggggtgggagggcagtggggactgaggttgttgagggttggtgtcttcggggaaggaagcagatctggcctcttcccctctttcagtttttttgtgttttttttccccgaggtggagtctcactctgtcgcccaggctggagtacagtggctcgatcttggctcactgcaaccttcaccccctgggttcaagcgattctcctgcctcagcctccctagtagctgggattacaggcacccaccacaactggctaatttttgtatttttagtagagatggggtttcaccctgttggccaggctggtctcaaactcctggcctcaagtgacccacccgcctcggcctcccaaagtgctgggattacaggcatgagccactgagcgcgacccctctcctagttttttttttttgttgttgttgttgtttgtttgttttgtttattttttgagagatggagtctcgccctgtcacccaggctggagtgcaatggcgtgatcttggctcactgcaacctctgcctcccaggttcaagtgattctcctgcctcagtttccctagtagctgggactacaggcgtgcgccaccatgcccagctaattttttgtatttttagtagggtcggggtttcactctgtgttgtccaggctgctctcgaactcctgacctcaagtgatcacccaccttggcctcccaaagtgctgggattacaggtgtgagccaccgcgctggcccctctcccagttttaaagcatctctgttccacagaggagtgaaaacgtgtgggcaatgtggtctagctggggaaagaactgagagacagagaggagcagagagtaaagagtaagatctggaacttacagggagttggtcttgtctgcgctttgctgggataagtaagcggcaggaggcaggggctgctggttccatgttctcaggaagtcaggccatggctggggctggctgggttggtttactgtgggggaggctggcatggccccccgatcggcccccttcactctctctcccctcccttcccagaactctatgtccagccatggaaagcagggggcccccaagaagcggaaggcgcctccacctcccgccagcattcccatgccggtgagagatgctctgggcacgggaggaggcatggggagcccccaggcacggggaggggctctggctgagacctgggatggggcaaccttaggccccatctaaaggccgtggtggggaggggaacaggatgatcgagatgcctatgaggagatcgtgaggctgcggcaggagaggggccgcctcctgcagaagatccggggcctggaacagcacaaggaacggaggcagcaggaggttaggaggcctcggagatttgggcgtgggccagcctgggtggggtcaatgcaggcatgaagatccccctacttttctcccaccttccctcctccatctctctccctccccaccctgctgcagccacctgggcctcctcgctgttcctccaactcgccaggcgcagtcctgcctcagggcctttgcaccaccagtgtcctctgcctggaatgctctagcgcagtcctgcctcagggcctttgcaccacctgtgtcctctgcctggaatgctctagccccagatggccccacagctctttacctcacctactttatgcagtaggctcctcgccaaagacacttcccatgcccacttcccatgcccacttcccatgcccactttcttcaaaattgtaacatcaccccccaccacccccccggccaactcgctagttcactttattttttttttatttatttttggttttgttttgtttttgagacggagtctcgctcttgttgcccaggctagaatgcaatggtacgatctcggcttattgccacctccgcctcccgggttcaagcgattctcctgcctcagtctcccaagcagctgggattacaggcgcccaccaccacatccagctagttttgtatttttagtagagacggggtttcagcacattggccaggctggtctctaactcctgacctcaggtgatcctcccgccgcggcctcctaaagtgctgggattgcaggtgtgagccaccgcacccggcctctttatctccatttgcatcacttgctgctattgggcatgcatctgttttatgtgtgtccacccatttgactgtgagcctgcgagggcaggcatggctgatggtgcctgggtcacagtatgggcgtcgtcaatattgattgggtgagtgaatattcaagtgagtgtatgaatgaatggccaaaaccaggtctgccccataagaggcacccagtaaaaactttctggctgggcacggtggctcacacctgtaatcccagcactttgggaggttgaggtgggcagatcacttgaggtcaggagttcgagaccagcctggccaacatagtgaaaccctgtctctactaaaaatacaaaaaaaaaattagctgggcatggtggcaggggcctgtaattccagctacttgggaggctgaggcaggagaattgcttgaacccgggaggcagaggttgcagtgagccaagatcacaccactgcactccagcctgggtgacagagcaagactccatctcaacaacaacaaccacaacaacaacaaacaaaaacaatcttgttgagtgaatgagtggatggaacggtgcctggcatacagcaggtgcttaataagtacatagtaattgtccagaatggtgcatactggcacacacagcaggcacttaataaatacttagaaatgaatgactggtcagaatggtgcatgctggcacacagtaggtgctcaataaatactgagtgacaggtcagaacaatagctggcacaaagtaggcacctaataaataggaatgaggccgggcgcggtggctcatgcctgtaatcccagcattttgggaggctgagacaggcggatcacgaggtcagcagatcgagaccatcctggctaacaccgtgaaaccccgtctctactaaaaatacaaaaaattagccgggcctgttggcgggcgcctgtagtcccagctacttaggaggctgaggcaggaggatggcgtgagcccaagagacgcagcttgcagtgagccgagatcacaccactgcactccagcctgggggacagagtgagattccatctcaaaaaaaaagataaataaataaataaataggaatgaatgaggctcaacatacagcaggtgctcaataaatatttagtaatgagtgagcaggcagaatggtgcctggtacacagcaggcactcaatagtaatgagtgagcgggcagaattcagtaggtgctgaatagttgcacgtggaatgcgtgaatgtgcatggaatggaggctatgaagcaggaggtggggcagggaggcctcttgcccagatccaaacccctgtccctgtttctcccgtcagtccccggaggccagctccctgcacatcctggagagacaggtaggtgggaaggtggggaggagccggtcctcctgctgcccagcctttcctcccagaggcagctgagcctccactgctgctcccaggtgcaagagctacagcagttgctggtggagagacaagaggagaaggagagcctgggacgggaggtggagagtttgcagagccggctgtccctgctggaggtaggagcagtgatgagtcagggctgggctggggctgggtcggggaacttctctcctacagcagcgacaagacagtcacaccagtgcatgcacagcctcacacacgtgcaaacacacgcaccagacacatgcacccacaaacccacagtcttggctgggtgcgagggcttacgcctgtcatcccagcactttgggaggccgaggcgggcggatcacgaggtcaggagatcgagactgtcctggccaacatggtgaaaccccgtctctactacaaatacaaaaattagctgagtgtggtggtgcgcgcctgtagtcccagctactcttaaggctgaggcaggagaatcacttgaacccgggaggcgtagtctgcagtgagctgaggtcgcaccactgcactccagcctgggtgacagagcgagactcagtctcaaacaaacaaacagtcccacagtcacatgcacccatgcacatttacaaatgtgcacagacacagaaaggaccttcctttcttccccttctccttccttccttccctccctccttccttcctttccttctttcctttccttccttccttccctccttccttcctttctttccttccttccctccctccctccttcccttccttcctttccttccttccttcgttttccttcccttctttcttcctttccttcttccttcccttccttctttcttcctttcctttccttttccttcctttcttctctctttccttctatccttccttcttttttttttttttttttggacagagtctcgctctgtcacccaggctgggatgcaatggtgtgatctcggttcacggcaacctctgcctccctggttcaagcgattctcctgcctcagccttccaagtagctgggtctacagctgcacgtcaccatgtccagctaatttttgtattttttggggagtggggaggatggagtttcactcttgttgcccaggctggagtgcagtggtgcaatctcagctcgctgcaacctccgcctccctggttcaagtgatactcctgcctaccgcagcctcccgagtagctgggattacaggcgcacaccatcacacccggctaatttttgtatttgtagtagaaatggggtttcaccatgttggccaggctggtcttgaactcctgacctcaggtgaaccgcctgccttggcctcccaaagtgctgggattacaggtatgagccaccacactcagacccagaaaggagttttctctaagcatacgcatccatgcagggatggataaccactctctatgcacgtggcggagcatggttaacagcaggcacacccacaaacacacagtttacagacacgcaagaaacaacgtccaagaacacatcatcacacacgcatgcattgcacgtgcacccgtcttgtgcagtcacacacagacaacatgcccacaaatacatacacatgcaacaaatatttcttttttttttttgagacagggtcttgttctgttgtccaggctggagtgcggtggcacgatcatggctcactgcagccttgactttcccggcctcaagcaatcctctcacctcagcctcccgagtagctgggaccacaggcatgtgccaccacacctggctaatttttttctttttggagagatggggactcactatgttccccagtctggtctcgaactcctggcctcaagtaatcctcccatcttacaggtataagccaccaagccccaccagtatttctgaaaacacacaattatgcaaacatgtatacatatagaaaaccatacacacaaacacagagatccacaggcacattcaaaacacaaccacacatacaccagactaaaactcaagcatgaagccggaaacggtggctcacgcctgtaatctcagcactttgggagcctgaggcgagtggatcacctgaggtcaggagtttgagactagcctggccaacatggggaaaccccatctctactaaaaatacaaaaattagccgggtgtgctggcgagctcctgtaatcccagctactcgggaggctaaggcaggagaatcgcttgaactcaggaggcggaggttgcagtgagccaagatcacgccactgcactccagcctgggcgacagagcgagactctctcaaaacaaatcaacaaaaagtcatgcatgtaatctcacatagtcacaggaagggaggggcccccaacccacaacactatacccacacgtatggtcacaaagacacacctccagccagctctttgcatgccaaatggatactgtcgcatccactctcatgcagacaaacacacccacaggtaaccacagcctgccccgagtcccctcacccaggagggaaacgcccatggcacataggccaggaagctgggggatgctggcatacaccatgcatctgataaggagttaataaccaaaatatgtaaggaattaatgcaactcaatacccaaaaaacaacctagttttaaaaatgggggcaggctcggtggctcacgcctgtaatcccaccactttgggaggccaaggcgggtggatcacctgaggtcaggagtccgagaccagcctggccaacgtggtgaaaccacgtgtcactaaaaatacaaaaattagccaggcgtggtggtacatgcctgtaatcccagctactctggaggttgaggcgggagaatcacttgaatctgggaggcgaaggttacagtgagccgagatcgtgccatggcactccagcctgggggcaaaaaaaaaaaaaaaatagggccaggcacagtggctcatgcctgtcatcccaacactttgggagactgaggcaggaggatcgcttgaacccaggagttcgagactagcctgggcgacgtgacgagaccgcatctctgaaaaaaaaaaaaaaaattaaaaattagccaagtatggtgttgcacacctgtagtcccagctgcttggaaggctgaggtgggaggattgtttgagcccagaggttggaggctgcagtgaactatgatcgcaccactgcactccagcctgggtgacagagtaagaccctggctccaaaaaaaaaaaaagtggcacggggagtgggtggcaaaggacatggaaggtgctcactaaatccttgtgggccaaatgcagccatctggtgctcgtgggagacatacaggtatgtgaacagcccagtccccactggagtcttggtggggacacacgggggctgagagcagaaccccgagctggactctgctccctccccccagaacgagcgggagaatactagctatgacgtaaccaccctgcaggatgaggagggtgagctgcctgaccttccaggtgagcccccacctccccacgcactcccagccgccttgtcccctggggccctggaagacggagcctctgggtgtgggggagtttgaagctgggagggaggtttgtactcatccgttttttaaattctgcttggctgagcctgccctgggaaccctgatccaccactccagccccccacctcctgtccccctgtggcccaggtccccagggcctgactctgcgtccccctccaggggccgaggtgctgctgtccagacaactcagtccgtcggcccaggaacacctggcctcgctgcaggaacaggtggctgtgctcaccagacagaaccaggaactgatggagaaggtccaggtagggaaagtgaggctggggacagatctgaggacctagggctggttccctgaggtcagggtgggcagggaaggtggcaaggctgccctgtgtccccacggtcacatcaactcctgccagactcctgccccccactccactccccagatcctggagaactttgagaaggacgagacacagatggaagtggaagctttggcagaggtcatccctcttgccctctatgactctctccgggccgagtttgaccagctacgcaggcagcacgctgaggccctgcaggccctgaggcagcaggagacacgagaggtccccagagaagagggggcagcctgtggggagagtgaggttgctggagccacggccaccaaaaacgggccaacccacatggagctaaatggctcagtggctccagaaaccaaagttaacggagccgagaccatagatgaggaggctgcaggagatgaaaccatggaagccaggactatggaagctgaggccacgggagccgaggccacgggagctgaggccacaggagccaaggtcacagaaacaaaacccacaggggctgaggtcagagaaatggagaccacagaagaagaagcaaacatggaaactaagcccacaggagctcaggccacagacacagagaccacgggagtggaggccatgggggtggaggccacaaaaacaaaagcagaggaagcagaaatgcaggcctacggagtgggtgctgggcaagcagagcccccagtcacagggaccacaaacatggaggccacgggctctagggccacagggatggaatccacaggagtcagtgccacaggtgtggagaacccaggggtagaggccacggtcccggggatctctgctggccccatcctacatcctggtgccgcagaggcctcggaaaagcttcaagtagagctggagaccaggatccgtggcttggaggaggctctccggcagcgggagcgggaggcagctgcggagctggaggcggccctggggaagtgcgaggccgcggaggccgaggcaggccggctgcgagagcgtgtccgcgaggccgagggcagcggggccagcgggggcggtggcggtgacaccacacagctgcgggcggccctggagcaggcccgggaggacctccgagaccgggactcccgcctgcgggagctggaggcggcctcggcctgcctggatgaggctcgggccagccggctgctggcggaggaggaggcgcggggcctgcgggccgagctggcccagcgggaggaggcgcggctggagcagagccgggagctggaggttctgcgggagcagctggccacggccagggccacgggggagcagcagcgcacggcggccgcggaactgggccgggcacgggacgccgctgaggcccgagtggctgagctgcctgcggcctgcgaggaggcgcggcagggcctggccgagctgcgggaggcctccgaggccctccgccagtccgtggtgccggcctctgagcaccgccggctgcaggaggaggccctggagctgcggggccgggcagccagtctggagcaggaggtggtggccacgggcaaggaggccgcccggctgcgcgcggagctggagcgggagcgtgtgtgcagcgtggcgctctcggagcacgaacgcatcgtgggcaccctgcaggccaacgtggcccagctggaggggcagctggaggagctgggacggcggcatgagaagaccagcgcagaggtcttccaggtgagcagggctggtcaccacccgggccccacccccattggccacgtggcggcctgttttagccccgcagccttgaggtgttttgaacccatcagttttacttgaacagacctactttattttatttatttatttatttatttatttatttttgagatggagtttcactcgtgtcgcccaggctggagtgtagtggtgtgatctcagctcactgcaacctcctctttcccggttcaagtgattctcctgcctcagcctccggagtagctggaattacaggcacctgcccccacgcccagctaacttttgtatttttagtagagatgggagttcaccgtgttggccaggctggtcttgaactcctgacctcaggtgatccacccacctcagcctctcaaagtgctgggattatgggcatcagcctccgcacctggccttgaacagacatttgaccctgcagccatcctgacctcttggaattttccacttgtgttttctctctttctttctctttatttctccttccttcctctctctttcctttctttcttcatcccccttccctccccccttccccttcccttcctttctttttttttttttttcagacagggtgtggctctgtctgaaaagtcacccagtcacccaggctggagtgcagtggcacaatcatagctcactgcaacctccacctcctgggctcaagtaatcctcccacctcagcctcccaagtagctggtaccacaggtgtgcaccaccatgctcgtctaactttttaattttttgtaaagacagggttttgccatgttgcccacgctggtctcaaacacctgagctcatggccgggcaccgtggctcacgcctgtaatcccagcactttgggaggccaaggtgagtggatcacctgaggtcacaagttcgagaccagcctggacaacatcgtgaaaccccgtctctactaaaaatacaaaaattaggttggcattgtggcacgtgcctgtaatcccagctactggggaggctgaggcaggagaatcgcttgaacccgggaagtggaggttgcagtgagctgagattacaccactgcactccagcctaggcgacagagcaagactctgtctcaaaaaaaaacaaaaacaaaacaaaaacaagcaaatagtagccaggcatggtggcacctgtggtcccagctacttggaaggccgaggtgggaggatcacttaagcctgaaagattgaggctacagtgagccatgatcgcaccaccgcactccagccaggagtgcaggtccggagcaacagagcaagaccctgtcttaaaaaaaatccaaaaacaaaagaacaaagtagaaggatcatatgaattctggggtctagcatcattggagtcttagtgtcctgagagtcatgcgtgggcttgggccacaggtgcagcgtgaggccctgttcatgaagagtgagcgacacgcagccgaggcacagctggccacagcagagcagcagctacgggggctacggaccgaggcggaaagggctcgccaggcccagagccgggcccaggaggctctggacaaggccaaggagaaggacaagaaggtgggtgccccctctcccacactcagtcagggaggcatccactcagcaaaggttggggccaatctacgaaggtcctcactgcaagggccttggaaaatcaacccattttccagaagggaaactgaggctcagaaacggaaggggacctggttacagcctctgacaagtcagacacacacaggctgctgttccaggtaccaattataaccacagttacatttattttatttttttacttgagacggagtctcgctctgtcgcccaggctggagtgcagtggcatgatctcggctcactgcaacctctgggttcaagcaattctcgtgcctcagcctcccgagcagctgggattacaggcatgcgacaccacacccagctaattttttatatttttagtagagatggggtttcgtcacgttggccaggctggtctcgaactcctgagctcaagtgatccgcctgcctcagcccccaaaagggctggggttacaggcgtgagccactgcgtctgtctccacagttacatttattgagtgcttactgcatgccaggccctgtggactggatgcatttagtcacatccagttctcacaggataggggcttttattatccccatttgaggaaacagaagcacagagaggtgaagtcacttgcctaaggtcacacagccatgcagtctttcagctgggtttgtacccacgttcccacgtttcgttcctaaacaatactaatgatgataacaacagcctccaggtgttagattgggaatttttcacacattacctttttttattgttgttttgtttttttctgaggcagagtcttgctctgtcacccagactggagtgcagtggcgtgatcttggctcactgtaaactctgcctcccgggttcacgccattctcctgcctcagcctcccgagtagctgggactacaggcgcctgccaccacgcccggctaatttttttgtatttttagcagagatggggtttcaccatgttagctgggatggtctcaatctcctgacctcgtgatccgcctgcctcggcctcccagagtgctgggattacaggcgtgagtcaccgcgaccggcctcacacattaccatttttaatcttcctgcaacgctaaaagccagaaagctttttttttttttggcagagtctcactttgtcacccaggctggagtgcagtggtgcaatctcagatcattgcagcttcgacctcctgggttcaagcgatcttcctgcctcagcctcctgagtagccaggactacaggttacaggtgtgtgccatcatgcctggctaatttttttgtttctttcttttttttttgagagaaagtttcactctgtcgctcagggtgaagtacagtggcatgattttggctcactgcaacctcacctcccgggttcaagagattctcctgcctagcctcccgagtagctgggactgcaggcgagtgccaccacacccagctaatttttgtatttttagtagagactgggtttcaccatgttggccaggctggtctcgaactcccgacctcaggtgattcagcctcccaaagtgctgggattacagtcatgagccaccgtgcctggcctgtttttttttgcttttgtttgtttgtttgtttgtttgtttggtaagagatggggtttcaccatattgcccaggttggtctcaaactcttgagctcaagcgatctgtctgcctcagcctcccaaagtggtaggatgacaggcgtgagccaccgcacctggtttcagaaagtatttttgtccccattttccagataagcaaaccaaagctttaagagatgaagtgagtggctcaaagtcacgcaacatgtcactggacaggagacgagacacccagagtcccaggcgcttcagcataaagaatgacccagcctcgactcactgtgggaccttagaccagacacttcacctctctgagcttcagtttcccctctgtaaagggagggcaaaattgcagttaggatgatggtttatctgtagcctggtttcttcccttgcacactgtggacataggagcgggatcatttcctgggctggggccatctgggcattgtaggggactgagcagcgtccttgacctctacccactccaagccaagagctcctccaagtcgtgacaaccacagatgtccccacacaacacccagtgtccccttggggggcagaattgcctcaagttgagaaccccagatctatagtaataataaggcccggcatttattgagtgcctactgttgactaggcacagtttaaacttaatctctgtgcaggatcacagcaactactaagttaagaactattggccgggcgcggtggctcacgcctgtaatcccagcactttgggaggcccaggcaagtggatcacctgaggtcaggagttcaagaccagcctggccaacatggcgaaaccccgtctctactaaaaatagaaacattagccagatgtggtgatgggcacctgtagtcccagctactcaggaggctgaggcaggagaattgcttgaacctgggaggcggaagttgtagtgagctgagatcacaccactgcactccagcctgggcaacagagcgagactctgtctcaaaaagaaacaaacaaaaacaaaaaaatgtgaaaaccaaccttagcttgtgggttgtataaaaacaggctgtgttggtaaccataagcatctaaaatataaataaatacaattaaaacaggctgtgggccagacgtggccctcaggccagagtttgctaaccccagggacgggaccttcccttgaaagcctttatccctggcctcttcctgcggctgcagagaggtcctcagcccccagctctgggcttagggtgatcgctgacagcacctgcaccctcagatcacagaactctccaaagaagtcttcaatcttaaggaagccttgaaggagcagccggccgccctcgccacccctgaggtggaggctctccgtgaccaggtgaaggatttacagcagcagctgcaggtaaggactgggccacgcaggggccaggggaccatcagggtggaggagtccaaatatttaccaatcagcacagcgcaggtgggaatcccaggagaggggctggggtaggcaggtggggtccacatcacatgcacggcatggccaggaaatacttcctttattttttttgagacagggtctcactccatcgcccaggctggagtgcagtggcacaatctcagctcactgcagcctccaccttccgggtttaagcaattttcatgccttagcgtcctgcgtagctggaattacaggcacgcaccaccacacccagctaatttttgtatttttagtagagatggagtttcaccatgttggcaaggctggtcttgaactcctgggctcgcataagcctcccaaaacgctgggattacaggcataagccactgctcctggccgccctctgccttttttttggacataggatcttgctctattaggctggagtgcagtggtgcaatcatagctcactgagcagcctcaaactcctggcctcaagcagttctccacctcaacctcccaaagtgcctggccatacatatatatatatatatatatatatatatatttttttttttttttttttgagccagtctcactctgtcacccaggctggagtgcagtgacacgatcttggctcactgcaacctctgcctcccggctcccgggttcaagtgattctcctgcctcagcttcctgactagctgggactacaggtgtgagccaccttgcctgggaaattttttgttttttttgagtctcactttgtcactcaggctggagtgcagtgcacgatctcagctcactgcaacctccgcctcccgggttcaagcgattctcctgccttagcctcctgagtagctgggactacaggcatgtgccaccactcccggctaattttttttacttttagtaaagacggggtttcaccatgttagccagggtggtcttgatctcttgaccctgttatccgcccgccttggcctcccaaagtgctgggattacaggtgtgagccactgcacctggccaatttttgtatttttagtagagacgggattttaccatgttggtccaggctggtcttgaactcctgacctcaagtgagccacccacctcagcctcccaaagtgctgggattacaaatgtatgccactatgccccgccatattttcatattttagcagtcggccatcaacgtacaggcttggggtgcaaagggtgctttttggtgtgttttgctcagtggggaggtgctcctgctcttctgagcgccccttcctcatgcccacaggaagctgccagggaccactccagcgtggtggctttgtacagaagccacctcctatatgccattcaggtgagtggcccagctcctgggtacccggtggctttgggcataccactgttgctctctgagcctcagtttccccttctgtacagtgggaggctggtctggggagaggttcgtggcatgtgggagcccccctgtgtgcatttccctcctggctggcttggtctatgggagtggtggagggacttggggcagccatggagggtatactcagggtcttcctctactcccccaaccctagggccagatggatgaagatgtgcagcggattctcagccagattctgcagatgcagagactccaggctcagggccgctgagaaaggccaggcccagtggctacactgaccacacccacgcagggacctcacccccctgcaggccccttgcagaccggcttcacttggcttcacttggccctatccaggcccatgcacttggagaccagcctggttccctgcccgaccacccccagctggctccatcaccccacctggtctctgcacgcacacactggtcagtctggacccgggccgtgactgcccctcccccaccaccggagactgtgattccctgtgtcctccacatccagacgccagcccaggaataaaggcattctgtgcacagggccaacgcgtgccgtctcgttgctgggcttccactgcggggagcggagagggtggcccagaaaaggaagcgctcacacccctccccacctaccccacgccacaaatcagccatcaggataaaccccatcttttttctttcttttttttttttttttttgagatagagtctcgctctgccgcccaggctggagtgcagtggcgccatctcggctcactgcaagctctgcctcctgggttcacgccattctcctgcctcagcctcccaagtagctgggactacaggcgcccgccaccacgcccggctaattttttatatttttagtagagacgggtttcaccatgttagccaggatggtcaatttcctgacctcatgatccacccgccttggcctcccaaagtgctgggattacaggcttgagccaccgcacctggcctcttttatttttttttatgcggagtctccctctgtcacccaggctggagtgcagtggagtaatctcgactcactacaacctctgcctcccgggttcaggtgattctcctgcctcagcctcccgagtaactaagattacaaggcatgtgccaccacacccggctcatttttgtatttttagtagagacagggttccaccatgttcgccaggctggtctcgaactcctgacttcaggtgatccatccgccttggcctcccaaagtgctgggaatacaggcatgagccatggtgcccggcctttggataaactccatcttaatgcaatatttcaaaaaggcaaaatgggtgcaaaaaaagtgcatgctgaactaagtatggaaatgttaaagaaaggcaggcttggccgggtgcggtggcccatgcctataatcccagcattttgggagaccaatgtgggaggatctcttgagcccaggagttgaagaccagcctgggcaacatggggaaacccccatctctatcaaaaatacaaaaattagctgggcatggtggcgcgcacttgtggtcacagctactcaggaggctgaggagggaggaccgcttgagtgcagcagttagaggctgttgcacttcagcctgggtgacagggcaagaccctgcctctaaaaaaagatttaaaaaaaaaaaaaaaggaaagaaagatactttcctaaatcctaaggctggccatggtggaagccccctacccccagcctctccctgccccttggcaactcccccgaaatccccacgggtttcttggcatttttcagcaaacagaggggaggcaggagtgggagcggggatccccgagcctgtccagcctgcccctgggggtttccttgttcctgggcatcctgatcgctgggatatctgcggtggcagctgcctcccctggcctgcgctcctgtgtctctctctgtctctcttctccatgtctctgtctctctctttttttttttttgagatagattttcgctcttattgcccagactagagtgcaatgatgcgatctcggctctctgcaacctccacctcccgggttcaagcaattcccctgcctcagcctccggaatacctgggattacaggcacgtgccaccatgcccagctaatttttgtatttttagtagagacggggtttcaccatgttagtcaggctggtctcggactcctgacctcaggtgatccacccatattggcctcccaaagtgctgggattacaggcgtgagccaccgcacccagtctccacgtctctgtctctatctcttggtctccatctgtctgtcttgctgttttgtctgtctccctgtgtctttgtctgtgtcttcctcctctcttatctctgtctctctgtgtttcttttgctctgtctctgtctctctcatgtccccatctcccatctctctgtctctttctatctctgtcttcttttttttttttttttgagacggagtctggctctgtcgcccgggctggagtgcagtggcgccatctcggctcactgcaagctccgcctcccgggttcacaccattctcctgcctcagcctcctgagtagctgggactacaggcgcctgccaccacgcccggctaatttttttgcatttttagtggagacggggtttcaccatgtcagccaggatggtcttgatctcctgaccttgtgatccgcccgcctcggcctcccagagtgctgggattacaggtgtgagcccccacgctcagcctttttttttttttttttttttgacacagagtctcactctatctcccaggctggagtgcagtggcgtgacctcggctcactgcaacctcctctcactgcaacctccgcctcccaggtttaagcgattctcccacctcagcgtcccaagtagctgggattacaggtgcgcaccacaacgcccagctaattcttgtatttttagtagagacggggtttcaccatattggccaggctggtctcgaacttctgaccttgtgacccgcccgcctcagcctcccaaagtgctgggattagaggcgtgagccaccacacccggccctctgtcgtcttctcttatctctctgtctctctttctgtgtctgtcatctccccgtatctctatttctgtcttcctgtcttctttctgtctctcttttgtctctctttctccatctctgtcattgccccatcagtctttttgttgttgttgttgttctttttgagatggagtctcactctgtcacccaggctggagtgcagtggtgtaatcttggttcactgcaacctctgcctcccaggtttaagtgattctccttcctcagcctccagagtagctgggattacaggtgcctgccaccacgcccagctaatttttgtatttttagtagagacagggtttcaccattttggtcaggctggtctcgaactcccaacctcaggtgatccatctgccttggcctcccaaggtgctgggattacagccgtgagccaccgtgccccaccatctctctatctctgtctatcctactctctcatctctgtctctctgtctctgtctctcatcttcccatctgtgtctctctttctctgtcttcctcccttatctctgtctctgtgtctctctcatttccctatctctgtcttcctctcttatctctgtccctctgtctctcttcctctgtctgtctgctctctgtgtttctctttctgtttccatcatctccctgtctctctctgtctctgtgtcctcctcctctcatctctgtctctgtctctctcattcccctgtctctctctgtctctatcatctccctatctatctctgtgtcctcctcctctcatctctgtctctctctgtgtttctgtctctgtcatccccctttctctgtctctgtcatctccctgtctctctatctctgtgtcctcctcctctcgtctctgtctctctgcctctctcatctgtatctctctctgtctctgtcatctccctgtctctgtctctctctatctctgtgtcctcctctcatttgtctctctgcctctctcatctgtatctctgtcactttctctgtcatctccctgtctctctatccctctatctctgtgtcctcctctcatctgtctctctgcctctctcatctgtagctctctctgtctctgtcatctccctgtctctctatccctctatctctgtgtcctcctctcatctgtctctctgactctctcatctttgtctctgtctctgtctctgtcatctccctgtctatctccgtgtcctcctcctctcatctctgcctttctcatctctgtgtctctctctgtgtttctgtctctgtcatgcccctttctctgtctgtcatctccctgtctctatctatctctgtgtcctcctcctctcatctctgtctctctcatctgtatctctctctgtctctgtcgtctccctgtctctctatctctttgtcctcttcctcttgtctttctctctgcctctctcatctgtgtctctctctgtctctgtctctgtcatctccctgtctctgtctctctctctctgtgtcctcctcctctcgtctctttctctctgcctctttcatctgtgtctctgtgtctctctgtcatctccctgtctatctctgtgtcctcctcctctcgtctctgtctctctgcctctttcatctgtgtctctctgtctctgtctctgtcatctccctgtctctgtatccctctatctctgtgtcctcctcttcttgtctctgtctctctgcctctctcatctgtgtctctctctgtgtctctgtctctgtcatctccctgtctctctgtgtcttccttctgtcttctctgtctctctgcctctctcccccatctctgcctctgtctccctccatgtccctgagcccctgcctgcctgcctggggtttcccccgcttcagggcagcggaaggaaggccagcaggacatgctgtgctgggaaaagccagcaggtctccacttctccctttcacagcctcctcccccgcccccaccctcggggccttccgagcaggggtggcctgtgctccccagggggctggggctcctccacaccctaattcatctccctagcggccccacgagccccaccagtgagtcagacctgaaggaagtcggggagggggcgggccttgaccctgggctgggctttcccctgggcaggtcccaagtcctcacctcccctctcaagtctcccacgacgttcccacccactcctgagagcagagctggccgcagccatgaccccgcagcttctcctggcccttgtcctctgggccagctgcccgccctgcagtggaaggaaaggtatgtggggcccctgggggactggggggcccaggcagacggacatgacacgaggactggcctcggatcatgtctggggtgggaaatcacatcctcccgtgcccaatggtgggatggggttaccctcccattgtacagatggaggaactgaggcacagagaggcagagtgccacattgggggtggaaggatgtcaccttgtgggtgatagggactggcagtcacagctcagaggtatccatagagctacacagacatagctacacagacatgcgaatttgagtcacactcattcctttggtttctttttggttttgttttttgagacagagtctcactctgtcgcccaggctggagtacagtggcaccatctcagctcactgaaacctccatctcctgggttcaagcgagattctcctccctcagcctcccgagtagttgggattacaggtgcccgccaccatgcccggctactttttatatttttagtagagatagggttttaccatgttggccagggtggtcttgaactcctgacctcaggtgatccacccacctcgggctcccaaagtgctgggatgacagatgtgagccaccgcgcccggccgacattcattcattttgcactagagaacatctccatgtccttgaagacaaaatggttacagcagggcatggtggctcatgcctgtaattccagcactttgggaggccagggcgtgaggatcgtgaggccaggaattcgagaccagcctgggcaacatagtgaaaccggaccccaccaatctgtacaaaaaattaaaaaattagctagatgtggtggcacgtgcctgtagtcccagctacttgggaggctgaggtgggaggataatttgagcccaggaattggaggctgcagtgagctatgattgtgccactgcattccagcctaggtgacagagtgggataccttgtctcaaaataataataataataataatttataggctgggtttggtggctcacgcctgtaattccagcactttgggaggccaaggcaggtggatcacctgaggtcaggagtttgagaccagcctggccaacatggtgaaactccctctctactaaaaatacaaaaattagccaagcgtggcagtacatgcctgtaatcccagctactcgggaggctaagaatcgcttgaacccgggaggcgggggtggcagtgagccgagatctcgccactgcactccagcctaggcgacagagggagactccctctttaaaaaaaaaaaacaattacaaaagagagaacacggtaaaatctctctctcttacccgagttcctctctgtagatgcttaaacctcagcttccctatctggaaaatgggctagtagtcctcacctagatggattgcagtggggataaaagatgacagatgacttttgtccatgtacctatttattccgaaagcctttattaggcacctaccatgtacctggtgctggctggcaacgtggcaggagcccagcgcacgggagggctatgacaatctgggggtaaaccagaagctcactctttctgtcttcctccagggcccccagcagctctgacactgccccgggtgcaatgccgagcctctcggtacccgatcgccgtggattgctcctggaccctgccgcctgctccaaactccaccagccccgtgtccttcattgccacgtacaggtcggagagcctggaagggggcctcagggacactggacttcctggagagcccagaactctggccctgagagccctggggtcaggaaaactggagaccccgacatcctgaaccccaggcctatggaattctagggcggccccgtccaatagaaatatactttctgggccaggcacagtggtgcatgcctgtaatcccagcgctttgggaggccgaggtgggcagattgcttgaggtcaggagtttgagaccagcttgggcaacgtagtgagacactgtctctacgaaaaattttaaaaattggtcaggtgcagtggctcatgcctgtaatcccagctactccggaggctgaggcaggagaatagcttgaacccaggaggcggaggttgcagtgagccaagatggcaccattgcactccagcctgggcaacagagcaagactccatctcaaaaaaaaaaaaaaaaaactacttcctgggttgggcacagtggcacatgcctgtaatcccagtactttgggaggctgatgtgggaggatcacttgaggtcaggagtttgagtccagcttgggcaaaatagtgagaccctgtctctaaaaacaatttttaaaattagctgggcatggccaggcgcggtggctcacgcctgtaatcccagcactttgggaggccgaggtgggcggatcacaaggtcaggagatggagaccaccctggcgaacacggtgaaaccctgtctttactaaaaatgcaaaaatttgccaggtgtgatggcacgcgcctgtagtcccagctactcgggaggctgaggcaggagaattgcttgacccaggaggtggacgttgcagtgagccaatattgcatcgctgcactgcatcctggtgatagagtgagaccccgtctcaaaaaaaaaaaaaaaaaaaaaaagaaaagaaaagaaaagaaaagaaaagaaaaaatttcgaaaaagaaaaaaaaattagctgggcatgttggtacttgcctgtagtcccagctactctggaggctgaggtgggaggatcacttgagcccaggagtttgagaccagcctgggcaacatagcaatatcctgtctgtacttaaaatcaaaaaaattagctggatgtaatggcacacatctgtagtcccaggtacttgggaggccgaggtgggaggatcacttgagcccagaagttcaagaccagcctgggcaacatactgagacccccccccatctgtagaaaaaaaatttaaaattagccaagagtggtgatgcgtgcctgtagtcccaaccgctctggaggctgagacagggaagatcccttgagccaggagttcaaggctataatgagctaggatcatgccactgcactccagcctgggcgccagagggagaccctgtcatgaatgaatgaatgaatgaagggatgaattaatgaatgaatgaaggaatgaattaatgaatgaatgaaggaatgaattaatgaatgaatgaacggatgaatgaatgaatgaatggatggatgaatgaatgaatgctgacatcccagaaacctttagaatcccggaccctagcatctagcttgggttgtaatccccgacctgaaccatcaggggcaccgtgatgttggggcccatgccctgcccccggggggtggcacggccaccaccaggaccccaccccgggatccccatccgctgccccctcctgttcctgcctctccttggggtcccgggtcaggcccggcagtaggaggtgctgaggccacaggcactccctgaggcgctcagcgagccccaccctgtgcaggctcggcatggctgcccggggccacagctggccctgcctgcagcagacgccaacgtccaccagctgcaccatcacggatgtccagctgttctccatggctccctacgtgctcaatgtcaccgccgtccacccctggggctccagcagcagcttcgtgcctttcataacagagcacatcagtgagtgggggcggcagtgggggcgggggcggggctgccgtctccttccagctccccccaccccacctcccacctgtcctccagtcctgcggctgcaccttcacacttaagcaaaaatctgaccccttcttccccctcctctaccagtacgtggagcacccccatcattgacagcccagtcccctccatcctgagccctggcctccacagtctgtccttcccacagcagccaccagagggcgcctgagagcacctgagtcagggcacgtccctctgcctacagccctccatggctcccacctgccttggggtcaaagcccaagtccttcctactgcccaccaaaccctggacaacctgccctgtctcctccatgccctcccctcctccctgtctcccccttgctcactctgctgtggccacatgtgattccttgatgttcaacatgccaggaatagttctgccccagggcctttgcatgggcggtgccctctacctggaacaccttcccccaaatgtccccatgacttattccctcacctccttcgggtctctgtgcatacatcacctcctcagtaagacctctcctgagtagattattaaaaattgcaagctctggctaggctcagtggctcacacttgtaatcccagcactttgggaggctgaggcaggccgatcacctgaggtcaggagtttgagaccagtcctggccaacatggtgaaaccctgcctctactaaaaatacaagaattagctgggcatagtggcaggtgcctgtaatcccagctactcagggggctgaggcacgagaatcacttgaacccaggaggtggaggttgccgtgagctgagattgtgccactgcattccagcctgggcgagagagcgagactctatctcaaaaaacaaaacaaaacaaaacaaaaattgcggccactgccattcctgcactccccagctttcttccctattctgtgtgacctatggatttgtttatttcctgtcttccccctgatggattgtgagttccatgaggacaggggtaggtcagttaaggtcactgttttgtcccctctgtggcagccccaggcacacagtttctcaataaatatttgttggttgagccaggcatggtggctcacaactactcgggaggctgaggcaggagaatcgcctgaacctgggaggcagaggttgtagtgagctgagatcacgccgctgtactccagcctgggtgacagagtgagactccgtttcaaaacaaacaaaatatatacataatatgttggttgaatgaatgagtgaatgaatgaatgactggacttactgtcccctgaccctgcttcctgcttgtccgtcagtcaagcccgaccctccagaaggcgtgcgcctaagccccctcgctgagcgccagctacaggtgcagtgggagcctcccgggtcctggcccttcccagagatcttctcactgaagtactggatccgttacaagcgtcagggagctgcgcgcttccaccgggtgaggaggatgagggggaggctggaaagggtggtgcctggcagagggaatggtttttaccaagactagcaggtgtgctgggctcttgcacatagcttgcgattccgggtgcattgaataagagcagtccagcaatctgattcctaggcctctaccgaaaaggatggaaagcagggacttgcacaagctgtcgcacacccgtttttgttgttattgttttgagacagagtctcgctctgtcgcccaggcagtgacacaatctcggctcactgcaaactccgcctcccaggttcaagcgatgctcctgcctcagcctctggagtagctgggattacgggcacgtgccactatgcccggctaatttttgtatttttagtagagatggggtttcatcatgttggccaggctggtctcgaacttctgatctcaggtgatctgcctgcctcggactcccaaagtgctgggattacaggcgtgagccaccgaattgttcactttattgattgattgattgaaacaaggtctagctctgtcacccaggctggagtgcagtggcgcgatcttggctcgctgaaacctccgcctcccaggttcaagtgattctcctgcctcagcctcctgaatagctgggactacaggcgcccaccacgcccggctaatttctgtattttcagtagagatgggattttgccatgttgcccaggctggtctcaaactacggagcttaggtgatccacctgcctgggcctcccaaagtgttgggactacaggtgtgaggacttcatctggccagaattagccattttaaagtgaacaattctggctgggcagggtggctcacacctgtaatcccagcactttgagaggccaagttgggaggattgcttgagtccaggagttggagaccagcctgggtaacatagtgagactcccatctctacaaaaaatttaaacattagttgggtgtggtgacacacacctgtacccccagttacaagaggctgaggtgggaggatcacttgggcctggaagattgaggctgcagtgagccgtgttggcaccactgccttccagcctgggtaacagagagagactctgtctcccaacttaaataaattaaataaaataaaaagcacggttaggctaggtgcagtggctcatgcctgaaatcccagcactttaggaggccaaggcaggcagatcacttgaggtcaggtgaaaccccatctctattaaaaatacaaaaattggcctggcgcggtggctcatgcctgtaatcccagcactttgggaggctgaggcaggcagatcacgaggtcaggaattcgagaacagcctgaccaacatggtgaaatcacagctctactaaaaatacaaaaattagccgggtgtggtggcgggcgcctgtaatcccagctactcaggaggctgaggcaggagaatggcttgaacccgggaggtggaggttgcagtgagctgagatcatgccactgcactccagcctgggtgacagagtgagactccgtctcaaaaacaaacaaacaaaaattagccaggcatggtggcgggcgcctgtaatcccagctatctgggaggctgacgtgagaggatggtttgagcctggaggcagaggttgcagtaagccaagattgccccactgcactccagcctgggcaacagagtaagactgtctcaaaaaaaaaaaaaaaaaaaaaaaaagcatggttaatatagtgggaccaggggtaaagggaggtatggggtcctatcccagaggtcctggtttagtcccagggaggagaaagaagaggattatagggatcagggatgtcctgatgaacaaagaccctcctgggtgagacatccacaggggctagtgtggtccaggaaggattcgtaagagaggtggctctgggggccacacagacagaggccgggattgggaggagcccatgatgctatttggggtggggccgcacagctggggccagagtcctggactggagcctgcagggggcagggaggactgcacgctccgttgtgtggttctgtgcacagtggcccctctccatcttctggttctagtgacctgacgctctctcttctctcaggtggggcccattgaagccacgtccttcatcctcagggctgtgcggccccgagccaggtactacgtccaagtggcggctcaggacctcacagactacggggaactgagtgactggagtctccccgccactgccacaatgagcctgggcaagtagcaagggcttcccgctgcctccagacagcacctgggtcctcgccaccctaagccccgggacacctgttggagggcggatgggatctgcctagcctgggctggagtccttgctttgctgctgctgagctgccgggcaacctcagatgaccgacttttccctttgagcctcagtttctctagctgagaaatggagatgtactactctctcctttacctttacctttaccacagtgcagggctgactgaactgtcactgtgagatattttttattgtttaattagaaaagaattgttgttgggctgggcgcagtggatcgcacctgtaatcccagtcactgggaagccgacgtgggagggtagcttgaggccaggagctcgaaaccagtccgggccacacagcaagaccccatctctaaaaaattaatataaatataaaataaattagccaggtgtgatgttgcgcgcccacagtcccaactacttgggaggctgaggtgggaggatcacttgagtccaggaggttaaggctgcagtgagctgtcgtcacaccactgccttcatgcctgggcaacagagcaagaccctggtttttttgtttgtttgtttgtttgttttaatcatagttgaggccgggtgcggtggctcgcgcctgtaatcccgacgccgaggcgggcagatcacgaggtcaggagttcgagaccagcctgaccaacatggtgaaacccggtctctactaaaaatacagaaattagctgggcatggtggcctgagcccgtaaccccagctactcaggaggctaaggcaggagaatcgcttgaacctgggaggcggaggttgcagtgagctgagattgcaccactgcactccagcctgggcaacagagcaagactccgtctcaaaacaaaaacaaaaaaaataatagttgaaatgaagactccagctgggtatggtggctcacgcctgtaatctcagcactttgggaggccaaggcaggtggatcacttgaggtcaggagttcaagaccagcctggccaacatggtgaaaccctgtctcgactgaaaatacaaaaattagccaggcgtggtggtgggtgcctataattccagctactcgggaggctgaggcaggagaattgcttgaacccgggaggcagaggttgcagtgaactgagatcgcgccatcgcactccagcctgggcgatggggtgactaagactccgtctgaaaaaaataaggaaatgaagactcctcttttcacttagaggagatccagcgaggacttagccctaaaccaaaggacacagaaaccacaaatccccactcccatagtgtcagggctggaccaggggacgtcatgggcctggggatgccagggtggggtggcagggattccgcctggagtgggacagtagaatccattcaggggcaggtgcggtggctcacgtctgtaatcccagcactttgagaggctgaggcgggtggatcacaaggtcaggagttcaagaccagcctggctaagatggtgaaaccccatctctactaaaaataataatacaaaaaattagccaggcgtgggtatccgcctgtagtcccagctactcgggaggctgaggcagaagaattgcttgaacccaggaggtggaggttgcagtgagccaagatcgcgccactgcattccagcctgggtgacagagcgagactcgatctcggaaaaaaaaaaaaaaaaaagaatccattaagaatccattcagattagcagttaggttggttcgcccagatgtcagcctcattgaggatagacaccaataaggtatgagtggctctggggagatttaactgaacagtgggcaaggaaggcagccaggccctgaaggagagagaaacagccttgggcttgtctgtgggttccacctgggtctccagtcaaaagtcacctcctccgagaagccttccctgactaccccatctgtggcaggtagagtaacactccccaatcccgcaaagacatccatgtcccaatctccagagctcatgagtattttgcctgatgcagccaaaggaactttataggagtgattacattaataatctcaaaggtctttaaagatgaaagatctttcatcaaattaatgaaaatgggccgggcgcagtggctcacgcctgtaatcccaacactttgtgaggccaaggcaggagaattgcttgaggccaagagctccagaccaacctgggcaacatagtgagacccccatctctaaaaaaataaaataggccaggcatggtggctcatgcctgtaattccagcactttgagaggccgaggtgggtggatcacgaggtggggagttcgagaccagcctgaccaatatggtgaaaccctgtctccactaaaaaatgcaaaagttagccaggcgttgtggcacacacctgtagctccagctactcgggaggctgaggcagaagaatcacttgaacccgggaggcggaggttgcagtgagccgagatcgtaccactgcacttcagcctgggcaacagagcgagactgtctcaaaaaaaaaaatagtaataaaataaaataaaataaaaataaaataataaaataagttagccaggtgtgatgtcgcgtgcccatagtcccagctaatcaggagactgaggtgggaggatctcttgagcccaggagatcaaggctgcagtgagctatgatctcaccactgtactccagcctgggcaacagagcaagaccctgtctcaaaaaaaaaaaaattagccgggctcagtggctcacgcctgtaatcccagtactttgggaggcccaggtgggcagatcacaaggtcaggagttcgagaccagcctggccaatatggtgaaaccctgtctctactaaaatacaaaaaaatattagccagacatggtggcatatgcctgtagtcctagctaatcgggaggctgaggcaggggaatcgcttgaacctgggagggggaggttgcagtgagccgagatcgtaccactgcaccccagcctggcaacagagcgagactccgtctcaaaaaaaaaaaaaattaaaaattagctgggcttggtggctcacagctatagttccagctacttgggaggccaaagtggcagaatctcttgagtccaggaggaagaggctacagtgagctgtgatcacatctctgcactccagcctgggtaacagagaaagactccatttcaaaaaaaaaaaaaaaaaaaaagccaggcacggtggctcacgcctgtaatccagcactttgggaggctgaggcgggcagatcacgaggtcaggagatcaagaccatcctggtgaacacggtgaaaccctgtctctactaaaaatacaattaaaaaaattagctgggcatggaggcaggcgcctgtagtgcccgctacttgggaggctgaggcaggagaatggcgtgaacctgggaggcggagcttgcagtgagccttagatcgtgccactgcactccagcctgggagacagtgagactccttctcaaaaaaaaaaaaagaaaaaacaagtatttctaaaaaatttaatagatgccaggcacagtggcttacgcttgtaatcccagcactttgtgaggctgaggcggctgaattgcttgagctcaggagtttgagaccagcctgggcaacatagtgagaccccatctctacaaaaaatacaaaagttaggcaggcatggtggtacatgcctgtggtcccagctactctggaggctgaggcaggaggattgcctgagcccaggaggttgaggcttcaataagctatgattgtgccactgcactccagcctgggtgagacagtgagaccccgtctcaaaaaaaaaagattaatagggatggggtctcaccatgttcctcagactagattccaactcctagtctcaagcaatcctctcaccttggcctcccaaagtactggaattacagggctgatgagccaccatgctcagtccattttttatttctgacctgtaaaactataataaatgtgtgtcgggcagaggcagtggctcatgtctataatcccaacattttgggaggctaaggtgggaggatcacttgaccccaggagtactagaccagccatggcaacatatcaagaccctgtctctcaaaaaaaaatttaaaatttagctgggcatggtggcatgcacttttagtcccagccacttgggaggctgaggtgggaggatctctgagtctgggagcttgaggctgcagtgactatgatcatagaaccgcactccaccctaggtgaaaaagcaagacgtgtctcagaaaaaaatataaataaataaaacaaatgcatgttgttttcagacactgagttggtggtcaattgttacaacagccataggcccctcaagcatcacctacaattgaccctttccatcactatccatggtcaaaagataaagctgcaaccttggccaggtgcagaggctcatgcctgtaatcccagcactttgagaagctgaggcaggtgaatcacttgagctcaggagttccagaccagcctggccaacatggtgaaaccccgtctctactaaaaatacaaaaattagctgggcgtggcacacgcctgtggccccagtgacttgggaggctgaggcaggagagtcacttgaactcgggaggtggaggctgtggtgagctgagatcgcgtcactgcactctagcctgagcaacacagtaagactgcatctcaaaacaaaacaaaacaaaaatgctgcaacctatatagttcagagatctgaattgggttttctttgcaattctggaatcaggcaacacctcatttcatcaaatcgaattagctactaaaacaccaggtgtttggtctaggtcttgctgccctctgcgcagaaagccaatcaccgaggcaacaaggattgccagggaggaatgctttatcctgccgctgcagtcaatgagaaggggtggtaaagtctcatatgtctccctgaccaactaaaattggggagtttatatagctggggaatgggagaaaacaaattcagggagggtgttaaggaagtaatcttgatggatgatggggtctggcctctcattgtctggatgtgatgatctgatgagtttcagttccttgcctgatggtcagtttcctgaggaaggaactgagatgagacaaatgtaagtttcaagttttaagactagggaggatccatttctgtgtttattcaaataatcataagtattcgttttatggaacaattggaccagtttcagaatgtttccatgagctgagcagacaacattaggggttctttttctttcttttttaaagtctgttaaaccttccattttttttttttcccgagacagagtctctctctgtcacccaggctggggggcagtggcgtggtcttggctgactgtaacctccgcctcctggattcaaatgattctcttgcctctgcctcccaagtagctgggactacaggtgcccatcatcacacccggctaatttttgtatttttagtagagatggggtttccccatgttggccaggctggtcttgaactcctgacctcatgatcaacccgcctcagcctcccaaagtgctgggattacaggaatgaggcaccatgcccggccaaaccttccacttttgcaaagcaggttttatttatttattttgagacggagtttcactcttgttgcccaggctggagtgcagtggtgatctcagctcactgaaaaagaggttggttttatagacagaaaaaggctgagtaaagcagaaatagaaaacaaaaagtggattggtcttttcaaagttacttttcttgtcaagtttagagcaaaggagactatcgtgctggctaaaacaggcctgttcagggatttttttttttttttttttttgagacagtctcgctctgtcacccaggctggagtgtagtggcacaatcttggctcactgcagcctccacctcccgggttcaagcgattctcctgcctcagcctcccaagtagctgggactacaggcgtgtgccaccctgcccagctaatctttgtatttttagtagagacagggtttcaccatgttggccaggatggtctcaatctcctgacctcgttatccacccgcctcccaaagtgcagggattacaggcatgagccacagtgcctggcctttttttttttttttttgagacagaatctggttctgttgcctaggctggagtgcagtggcatgatctgggctcactgcaatctccgcctcccaggttcaagcaattctcgtgagtcagcctcccaagtagctgggattacaggcacccaccaccgcaccccgctaattttttgtattttagtggaaacggggtttcgccatgttggccaggctggtcttgaactcccgagctcaggtgatctgcctgcctctgttcatggatttgactattccctctctttctctctctccctctctctctctctctccccacttccttccagttctcgatttcttggaaaaccagaaaaacaacttagtttcagcttggtgtaaaacttccgcatgagggacttcattttggtttagtcttttgggcctagtgcaggagctcagtccaaacccatggcttcctgtaaactttatttaacaccattccttgtcccatattattgtcttcctggtgccaggaaaaggggtccctagctgggtgtggtggctcacacctgtaatcccagcactttgggaggctgaggtgggtggatcacctcttgaacacctcaggagttcaagaccagcctgaccaacatggagaaaccccgtctctactaaaaatacaaaattagccggacgtggtggcacatgcttttaatcccagctacttgggaggctgaggtaggagaatagcttgaacctgggagacggaggttgcggtgagccgagattgtaccattgcactccagcccgggcaacaagagcaaaactcctcaaaaaaaaaaaaaaaaaaaaaaaaaaaggaaggctactcagttacaaagtagggcgtcctcagaaaacaagaggaggaacgccttgtctttgttttaaggtttttatttttattttatttattgatttatttttgagatggagtcttgctctgtcacccaggtacaatggcacgatcttggcacgatcttggctcactgcaacctccacctgccaggttcaagcgattctcctgcttcagtctcctgagtagttgggattcaggcatgtaccactgcgcccagctaatttttatatttttagtagagacgaggttttaccgtgttggccaggctggccttgaactcctgagctcaagtgatcctcccacctcggcctcccaaagtgttgggattacaggtgtgagccaccatgtacaaccggttttttcttatataggggtcttatctgtgtgaaagctatgtccacgtgtaggtgggctgaccgcgtgacaaaacgtagtactttgtcgacttaaagaaagttatcctggctgggtgcagtggctcacacctgtaattgtaacactttggtaggccgaggccggcagatcacttcagcccaggatttccagaccagcttgggcaacatggcgaaaccctgtctctacaaaaactgccaaatattagccaggtgtggtggtacctatagttccagctaactcggaaggctgaggtgggggatcgcctgagccgggaagtggaggccacagagagccatgattgcgttactgcactccagcctaggtgacagagcgagaccctgtctcaaaaagtatacatacatatccttgccattttagtgcctaagtacattacaccatgactataaccatattttctttttttttttttgagatggagtttcactcttgtcacccaggctggagtgcaatggcgccatatcgactcaccgcaacctctgcctcccaggttcaagtgattctcctgcctcagcctcccaagcagctgggattacaggcatgcaccaccatgcccggctaattttgtatttttagtagagacaagatttcttcatgttggtctggttggtcttgaactctcgacctgcaccaccgcacctggctaattttgcatttttagtagagacggggtttctccgtgttggtctgattggtcttgaactcctgacctcaggtgattcgcccacgtcggcctcccaaagtgctgggattacaggcgtaagccaccatgcccggtatctttttcttttttttctctttttttttttttttgagatggagtctcactctgtcgcccaggccacagggcagcggcacaatctcgatctcagttcactgcaacctcagcctcctgggttcatgcaattctcctgcctcagcctcccaagtagctgggattacaggttcccgccaccacgcccggctaatttttgtatttttagtagagatggggttccaccatggtggccatggtgaccaggctggtctcgaactcctgacctcaggtgatccaccctccttggcctcccaaagtgctgggattacaggcatgagccaccgcgcctggcgactataacgatcttaaaagcatacattgctatgcaatatcaggacatctggaccttccattgttgtagtagtgtgtcctcctaggcatttgtaagacgttttctcaattgtaaacatcttatgaccctggctcgtgactggcagcgaatgtgccttgttaattttaagatggagttgatttttggccaggtgcagtggctcatgcctgtaatcccagcactttgggaggcagaggcgagcagatcacctgaggtcaggagttcgagacctgcctggccaaaatggtgaaaccccatctctactaaaactacaaaaattaggcaggtgtggtggtgcgtgcctgtaatcccagctactcgggaggttgagacaggagaatcacttgaatcctgaggtggaggttgcagtgagccaagatcgcaccactggaggcagaggttgcagtgagccaagatcgcaccactgcccgtcagcctgggcaacagagcaagactcctcaaaagataaataaataaacaaacaattgccacagcaacatcaagaagttaccctatatggtctaaaaaagggaggtatgaataatccaccccttgtttagcatatcatcaataaatcaccataaacatgggcaaccaccagcccttggggctgctttgtctgtgaagtagccattcttttattcatctactttctaaataaacttgtttttgctttgcactgtggactcgccctgaattccttcttgcacgagatccaagaaccctctcctggggtctggatccggacccctttcctggaacaatctgacacagaggaaacgtccatgaaaggtggggaggaggctggggaaggaggctggggaaggaatgggatgggaagtcctcgttaaggggaaggcacaggtgggcaatggagggacatttgggagacactgcgtatgtttaggaagttggtttggagcctgatctttaagtcaatgtctgtgactcaagagtcgtccagggtcctcttaagtcaccctatgtgtggccccaaccccatgtgagagttgcgggcccaggaacgatgtgtggattcccagagcccagaatacaaggcaggcgcataatacatatttgctgaataaaagaatgaagaacaagaggtcacgttacaaaattttaacgagccgctgcccgcttctagggggcgcagcgcactatacaaaattctccaattccacatggctcccggaatccttatttcgcgctactcaggttgcaactccggagggaagacgctgggacttccagcttgataggcggggattggaaccaatgaaagaggtctgctgtgtatgctgcagccaataatagcggccgaaggaagtgacgtttgcggaagtaaggcttccgtcggaaaagctcgataattacccagcctaaccatttctcaggtgcttgcgaggtgatcagaaggcaaagatgtcggagcgaaaagtattaaacgtaagtgttgggcgactggggcttttcaatcggagcaggacatcccggaactccgggagagggaggagcttcctgagatctcttctttggaacccttctttcccagcggccttccgcgagatggggcttcccagactcctccctagactcctccccatcgccttccgtcgggggggtgggccttcgctaagtctcccttctgggctggggtgtagttagtcacctgcggggcgtggcttgggcttttacccaatcaccaccagatagggttttttttctgggggcggggcttccttaaatgctggcggccgtgttttgccctcttcttgaggggcgtggctctgagaagccccgccccacttggggactgtaaccaatcgtgtactttgggtggggtggggtggggtggcgcgtgtgtgtgtgtgtgtgtgtgtgtgtgtgtgtgtgtgtgtgtgtgtgtgtgtgtgtgtgtgtgtgtgtgtgtgtgtgtgtgtgtgtgtgtgtgtgtgtgtgtgtgtgtgtgtgtgttttgttttttttactggggtctggtcatgcagataacctctgccttacagtggccaagattttactggggtctggtcatgcagataacctctgcctgacagtggccaagattccagactcccagaagaaaagcagaggttcagtataaactatactgttggcacacttctgttttttggttttttgagatggagttttgcgcttgcttcccaggctggagtgcagtggcacgttcttggctcactgcagcttctgcctcctgggttcaagcgattctcctgcctcagcctcctgagtagctgggactgcaggcgcccgccaccatgcctggttaattttttttgtattttagtagagatgagatttcaccatgttgcccagggtggttttgaactcttgatctcaggcattccacccacctcatactcccaaagtgctggaattacaggcgtgagccaccgcgcccggccccacgcaggtctttctaggagagcagtctcaggcttgctgtaggaactcctgggaaacaggagccctgggatacaaagggagtgtgagtatggattatgacagatacctccactgcaccactggaaaataaagcactttgtgtttggagcacctactgggtgccagacactgcaaagagcactttatcccccttgcctcaaggaatgcgtgcaaagactcttggagacagaggacagtgtgcgcatttcacagaggagtaaactgagccctgcaggtttcagctcctcaggattcagatccagggagatgactctgtaggaaacggatgtagtatcgtgattgggaggctgagctaacagagtcctggtttaccctctacagaattgctggggagttgggactcctcggggaactcggtctcctgcctgaacaacagaagtgctaagcaaagcttaacctctacaaagggcagggcatgatggctcacgtgtgtaataccagctctttgggaggccaaggcaggtggatcacctgaggtcaggagttcgagactagcctggccaacatggtgaaaccccatctctactaaaaatacaaaaattagcggggagtggtggtgggcgcctgtaatcccagctactgtagaggctgaggcaggagaatcgcttgaacccaggaggcggaggttgcagtgagccaagatcgcgccactggactccagcctgggcaacaagagcaaaactccgtctcagaacaaaaacaaaaacaaaccctggctttttagagcttcccgtgtagacagcatttcatgtgtattgtcatgactggtatttaggagaattaaatgcgtcctgtataactccactaggagagagtcaggaagcttgtgcctggcctccctctgactgtactgagtcctgcgagtcctccctgcctgtcgcggaacctggggtgggcttggggacccccgacacagctccccagagccccttccctctgccatgtcctgcccctgcttctgaaaataactcccccaacgtttccttcctcccctgcagaaatactacccgccggactttgacccatcaaagatccccaaactcaagctccccaaagaccggcagtacgtggtgcggctgatggcccccttcaacatgaggtgagcaccccctgcgtgaccccacacaccagtcatggctgaaggacgcagtgcctggcatccacagaggtgactcgtccggtgttaagaccagatcactggtcttagacattgtcctggctcagacattgaccattccaaccctccttcgcctcaccacttgggattaagctttggatcttttagagccctccagccagtgcctgccttgagatcatggtggttagtaaacgtgtgtgcagagaggataggacgccacagagatgcagccccatagatatatttcagctcctccaacagccaagctcgttcctaccccagggcctttgcacacactgctgcccctgcttggaactctctccctctactttctttctttctttttttttttttgttgagacagagtcttgccgtgttgcccaggctggagtgcagtggcgtgatctcagctcactgcaacctccacctcctggcttcaagcgattctcctgcctcagcctcccaagtagctgggattacaggcgtgcaccaccacgcccggctaatttttgtattttcagtagagttggtgttttaccatgttggccaagctggtctcgaactcctgacctcaggtgatctgccctccttggcctcccaaagtgctgggattgcaggcgtgagctgccgcacctggccttctccttctacttacacatggcaggctcctcttgtctgccataggtcatggctccaatctcacccctccgggaggcctccatcatcccctcacggtgcccagatcttgccttttgtagcacttcagaattactgtatttcaccaactctcaaccccataccttttcatgctctagcatatctgaaatcacgcacctaacgaggaaagagacatctgggtcagtgaaattcggttcatgcccatgtgttgttggcctgtctactcctccccctcattcattcatttattcattcaacactcatttattgggcacctgctgtgtgccagggtctgtgccgagcgccaggaacaaagtccctggcctcatggagcccacagtctaatgggaagtggagaatagtggtagtcaggcaggtgcacgggcccccgaagtcaggcaggagagagcccctggggcagtggcgcaggagggagggctataggtagctggggtacggtgacatcaggcaaaatactggtggcgctgaggtctgaggatgaagggtgtcgccggccatgagactgtaggagcagaggccttgagctgggactgagctgggggtgtttgcaggatcagacaggaggcgggcgtgctgggctggggagcagagcccggagtaggaggggaagaggggggtggggcagcatttttctgtgtggcatctttcctcctggagggtggggtgccccgtaagcacaaagattgcttctgggagtgcatgacaggcaggcctcacctactcagggggcttcccaagcaggcgacccttggactgagccccaggaagatatgaatgagaacacgaagttctcaggtagaggaaatttggacacagggtggggcagcctgcctcttgaaggagggagctccccgttgctggaggcaagcaagcagtgatcttgcaggatgccgcagggacagcctgccagtgggagccagcgtcccaagacagctcacatccctacatgctgccccgcaggtgtaagacgtgcggagaatacatctacaaggggaagaaattcaatgctcggaaggagacggtgcagaacgaggtctacctgggcctgcccatcttccgcttttacatcaagtgcacgcgctgcctggcagagatcaccttcaaggtaggtgagacggccggccaggccggtccctctcccccagcacacctcagatcagggcgggccctggggttccttaactccaatcctctccatccagggaatctcatttcagtttatccccaagaaacagacaacagtttgggggagatgttcatggcagcattctaaataaaggcaaaaagacagaagcaacctagatagataataataagggatgagaagaacaaattagcatgcaggctgggcatggctcacacctgtactcccagcactttgggcggccaaggcgggcagatcacctgaggtcagaagttcaagaccaccctagccaacatggcgaaatgccatgtctactaaaaatacaaaaattactgggcatggtggcggactataatcccagttactcgagaggctaaggcaggagaatcacttgaagctgggaggcagaggttgcagtgagcgaagattgcaccgctatactccagtctgggtgacagagcaagactccaactaaaaaaaaaaaaaaaaaaagccaggcacagtggctcatgcctgtaattccagcaggttgggaggccaaggcaggaaagagagcccctgaggtcaggagtttgagaccagcctggccaacatggtgaaaccccgtctctactaaaaatacaaaagtgagccaggcgtggtggctcatgcctgtaatctcaggtacttgggagaccaaagcaggagaatcgcttgaacccgagagggagaggttgcagtgagccaacattgcgccattgcactccagcctgagcaacgaaatgaaactctgtctcaaaaagaaaaaaaaaagtagcgtgcaatggaatattacacagccaataaaaattgcaatttgacttttatttgttaccttgagaatttaaggaaagactgaagataacttaaaattttctcttcctatgcttaagtactctttgaatacttttttgccataagctttttttctttgattaaaaaaacattttgggctgggcgcagtggctcacagctataatcagcactttgggaggccaaggcaagtggatcagttgaggtcaggagttcgagaccagcctggacaacatgatgaaaccccaactctactaaaaaaaaatacaaaaataggccgggcgcagtggctcacgcctctaatcccagtactttgggaggctgaggcaggcggatcatgaggtcaggagatcgagaccatcctggctaacacagtgaaaccccgtctctactaaaaaaaaagcagaaaaaaattagccaggcgtggtggcgggtgcctgtagtcccagctactcgggaggctgagacaagagaatggcgtgaacccaggaggcggagcttgcagtgagctgagatcgcgccactgcactccagcctgggcgacagagcgagactccgtctcaaaaataaataaataaattaataataataataatattttggctgggtgcagtggctcacgcctgtaatcccaacactttgagaggtcaagggagaaggatcgcttaaatccaggaattcaagaccagcttgggcaacatagtgagatcccgtcagtacaaaaaaatataaaaattagctgggcatgatggcatgcgcctatagtcctagctacttgggaggctgaggcaggagaatcaattgagtctgggaggccaaggctgcagtgagccatgatttcactgctatactccagcctgagtgacagagtgagaccctgtctgcaaaaaaacaaacaaaaactttttttgaaatacctgaagatttacagaaaagttccaaagatagtacagataattctcacctaccccctcaccaacttccccgaatattagcatcttatataaccagggtacatctgtcacagtaagatactaagggtggggccaggcatggtggcttactcccagcgctttgagaaggcaaggcaggaggattgctggggaccagaagttcaagactagcctgggcaacatagtgagaccctgtccgtgtctacacacacacacacacacacacacacacacacacacacaaattttaattaaaaaaagaaactaaaggtggaatgttaccattaacattgtaggctgtggctgggtgcagtggctcatgcctgtaatcccggcactttggaggccaaagcaggaggatcggttgagtccaagagttagagaccagcctgggcaacatggcgaaaccctgtctctaccaaaaagaaatttaaaaattagccaggtgtgatggtgcatacctgtagtcccagctactcggcaggctaaggtgagaggattgcttgaacccgggaggctgaggttgcagtgagccatgatcctgccgctgcactccggcctgggcaacagcacgagaccctgtccccaaaaaaataaaaaacatagtgttactattagcatttagaccaaaggtagatttcagtttttctgctaatgtcacttttctgttccagtgtgtaatttaagataccagggtgtatttagcctctctattcaataaacaaaaacaggggcatgctgtatacatatttgtacatgtgatttataatcaaagaaaaggtgttaataaatacaaagggcagaaatcacaacatgtgcagaaccttggagatttttttttttttttgagacagggtctcactttgtagccaaggctggagtacagtggtgtgatctcagcctcccaggttcatgtgattctcatgcctcagcctccagagtagctgggattacaggcatgcaccaccttgccctgcctaattttttgtatttttagtagagacagggtttctccatgttggccaggctggtcttgaatacctgacctccagtgatccacctgcctcattggagagtttgtttgcagtcatgttaagggtagggagtggaggatgcagggaggcagtgggcagatgagaagagtcttaaagtccatgccagggagttgggcatttttgcccatggagatgggaggagcactaggaagaaatctcaccagtcaaagcaataagacaagaaaaagagaaggtagtagaaccagtaaaaatcagagagaaggggccctgatctgctggtggtactttagaagattctagtgcctggggatgtaggagctgatgtctgtctatcctccctgcagacagaccctgaaaacacagactacaccatggagcatggagccacgcggaatttccaggctgagaagctcctggaggaggaggagaagagggtgcagaaggagcgggaggacgaggagctgaacaaccccatgaaggtgagtcgggggccatgtaggtgttcatgggcgctgtgtgtgtgggtgtgtgtgtgtgccaatggttgtgcccttcctgcctcaggtccccaaggaaggaagatggggtggggggcgtggttggtaaaactttaagatgtccccaggaggccaggcatagtggctcatgcctgtaatctcagcactttgggaggctgaggcgggaggatcacttgaggtcaggagtcctagaccagcctggccaatgtggcgaaaccctgttcctactaaaaattttaaaacttaacactgggcgcagtggctcacacctgtaatcccagcacttttggaggccgaagtgggtgggtcacgaggtcaggagtttgagaccagcctgaccaacatggtgaaaccccgtctctactaaaaatacaaaaattagccaggcatggtggcacgcttctggaattacagctactcaggaggctgaggcaggagaatcgcttgaaccggggaggcagatgttgcaggaagccgagatggcgccactgcactccagcctgggtgacagagtgagattctgtctccaaaaaaaaaaaaaaaaaattagtcaagcatggtggcgcatgcctgtaatctcagctacttgggaggctgaggcaggagaattgcatgaacccgggaggcagaggttgcagtgagccgagatcaaaccactgcactccagcctgggcagcaaagcaagactctgtctcaaaaaaaataaataaataaaagaaattatgttcacttccaataggacaattttgtattttctcagaaatattaaaaggagccatgcatggtggcttgaacctgtagtcccagctactttaggggttgagacaggaggatcacttgagtctaggagtcaaagaccagcctgggcaacatagtgagactctgtctctataaaacattaaaaaattagccaggtgcttgccaggcgtggtggctcacacctgtaatcgcagcactttgggaggccaaggcaggtggatcacaaggtcaggagttcaagaccagcctggccaagagggtgaaaccccgtctctactaaaaatacaaaaaattagccgggcatggtggcagacacctgtaatcccagctactcgggaggctgaggcagagaattgcttgaactcaggaggcagaggctgcagtgagctgagatcatgccactgcactccagcctgggtgacagagcaagattctgtgtcaaaaaaaaaaaaaaaaaaaaaatcagccaagtgctttgggaggctgaggcaggcggatcacctgaggtcaggagttcaagaccagcttggccaacacggcgaaaccctgtctctactaaaaatacaaaaattaaccaggcgtggtggcacgcgcctataatccaagctactcaggaggctgaggcaggagaattgcttgaacccaggaggcggaggttgcagtgagccaagatcgcgccattgcacttcagcctgggcaacaagagtaaaactctgtctcaacaacaacaacaaaaattaggcaggtgtactggtgtgcacctgtggtcccacctactagggaggctgaggcgggaggatcacttgagcccaggaagttgaggctgcagttagctatgatcacatcactgcactccagcctggaagacagcaagactgtcgcaaaaaaaaaaaaatatatatatatatatatatatatatgtacacacacatatacatatatatacatacacatatatatataaaacagatttttaaatgactgtgttccctgctgtcccctcctgcttccatatttcccatccattcttatctattcctggacccacccacccctgccaaatgtgagttttctgagcaagccacatcagaccagatacaacattttccatggccatgcagagcaacagggagggaaatgagccttggcaagggtttggtgtgtgcctgggcctgtcgcactgctgtctgtgtgtgaatttagttacctccacactgacagcaaggggctcttaccctggtgttagtcagctattgctacataacaggttatcccaaaacttagtgactgaaaacaacaaacatttattatcccacagtttttgagagtcaggcatccagaagcagctgagctggatggttgtggcttgggggctcccatgaggttgcagtcaaggtgttggccagggcagtatcatctgaaggctggactggggctggaggagccactcgcaaactggctccctctactggctgttggctgtcagcctcagttcctcgctgtgtggggagctgcttgagcaacctcacaacatggcagctgcgtaccccagagcatgtgacccaagagtgagagcaaggaggaaggcctgtgcttttacatcctagtctcagaagttacgtgccattatttctgtcatattccattagagcaagtagcttgtccagcccctgctcaaggggaggggagtcacctccaccccttaaatggaggagcatcagagagtttgtggacatacttttaaactgtcagaattgccatttttccaaagggtaaatacaacaaggtcacagcactgggaagcagccaggcaggattcactcccaacctgcctggctccaaagccacttctcagggacccgtggccaccagactcgcctccctcagcctcagtttccgtttctgtaaaatgggggttgtgaggattaaatgagatggcatatggaaacctcttagcccagggcccggtgtacagtaggtgctcaggttgtcttttacaatttttccttaatattattatttttgagatagagtctcgctctgtcacccaagctggaatgcattggcacgatctgagctcagtcaacctctgcctcctgggttcaagtgattctcctgcctcagcctcccaagtagctgggattacaggtgtgtgccaccacgcctggataatttttgtatttttattatttatttatttttttgagatggagtctcactctgtcacccaggttggagtccagtggtgcaatcttggttcactgcaacctctgcctcccgggttcaagcaattctcctgcctcagcctcccaagtagctgggattacaggcacatgccactacgcccagctactttttgtatttttagtagagatggggtttcgtcatgttggccaggctggtcttgaactcctgacctcaagtgatctgtctgcctcggcctcccaaagtgctgggattacaggcgtgacccataacacccagcctgtatttttagtagagacagggtttcaccatgttggccaggctggtctcgaactcctgatctcaggtgatccgcccgctccggcctcccaaaatgctgggattacagacgtgagccactgtgcctggccaaatttttccttattattcttactgaaagatggcaccaggccagaaatccaggccacctgggtccagagccagcctctttccaccccaccctgccccagggctcagatcccggctccaccactgctcagccccatgtggtcactttccctccccagacctgagtgttctcacctgtgaaatggacacagcgctgggcatgggcagggggttccctgagcaggatggaaacgtgggggtaggggttcctcccgtggcccgcagtggcccccgaggccagacagggtttgccccgtggtgcgatccccatgcactcagccccgccgccccgcgcccgccaggtgctggagaaccggaccaaggactccaagctggagatggaggtgctggagaacctccaggagctgaaagacctgaaccagcggcaggcgcacgtggacttcgaggctatgctgaggcagcaccgcctgtcggaggaggagcggcggaggcagcagcaggaggaggacgagcaggagaccgcgtgagtcagggccggcccaacccagccccacctcgcagcctctgccccggcaggcgctgcctctgccccagaccctttccccgctctctggagtgtcgcctttgcaaggacccctttcccaccgcccatctcactttctcccttgtggcgtctctcgagggggtcccaggccactgccgggcacggtgacttagcacgtggtcgcccgcatggctgcggtttgtcacagcgagaggacacagcagattcagcaaaggggaaaggcatgtgtggtgtgtcgggggccaggccttccagatcctctcctggtggagcttcgcaggacgcgcctcatcccctagcaccagcctggaggactcgagaaaggcgccatcactagggaagctcctagagacccagcgtggggttcctatggggcctggtcccacagcccccgctgcctcacccatgccgggattccagactccagaggaaagcaggggtcacgcataaaccatggtgtttgcaggaacagctgaagccccagagcccgtcccatccatgagggtgggaggcccccagcacaggctcccggacacccaccaagggacgccctcaccagccgccttctgaggacacagcctcaggcctcctgggtgaacacttttctttttttttttttttttttttttttttttgagacggagtctccctctgctgcccaggctggagggcagtggcgccatctcgctcactgcaagctccgcctcccgggttcatgccattctgcctcagcctcccgagtagctgggattagaggcatccgccaccaagcccggctaattttttgtaatttttagtagagatggggtttcaccgtgttagccaggatggtctcgatctcctgacctcgtgatccgcccgcctcggcctcccaaagtgctgggattgcaggcgtgagccaccgcgcccggacgacgcttttctttttctttgagacggggttttgctctgccgcccaggctggagtgcagtagtgcagtcatagctcactgtagcctccatctcccgggctcaagcgttcctcctgcctcagccttctgggtagctgggaccacagggacacatcaccatgcccagctaattgtttttatttctgtagagacaggacctcgctatgttggacaggctggttttgaactcctggcctcaagcgatcctcccaccttagtctcctgaagtgctggatgacacgtgtgagcccctgtggttggctggtgaatgcctttgacgccgaccacctctgagcccgcgtgctgatcccctcctttcctggtgcctcatctcccctccctcctttagaatctgagctgtaaggacagggacgtggtggcctctcctgtgtccccagggcttccagcaggtaggttctggtaggttccacgtcagtgcctgatgggtgtgcagagcagcgataccgtgcagaacagtgttgggagcctgcgttcatcctgcaccttccgggtgccgggcgtggctgtaacctcactacccacacagccctgggggtcagtgtgatcttcatcatggaggggactgaggtccagggaggtccaggcatgagccccaccaaggttaccctccaggctccatccagacaggctggttccggcatccaggcacttaaccacaccactgccctcggtggacacggaaaagttaatgtaaaaaagtagaaggggccgggcgcagggtctcctgcctgccatcctgcactgtgggaggctgaggcgggcggatcacctgaggtcagcagttcgagaccagcctggccaacatggcgaaaccccatctgtactaaaaatacaaaaacaaattagctgggcgtggtggcagatgcctgtaattccagctgctccagaggctgagacaggagaattgcctgaacccgggaggcagaggttatagtgagccgagatggtgccactgaactccagcctgggcgacagagcaagattcctcctaaaaaaaatgaaaattaaaaagtagactaggtgcggtcggtggctcacgcccgtaatcccagcactttgggaggctgaagtgggcgtatcacctgaggtcaggagttcgagaccagcctggccaagatggtgaaaccccgtctctactaaaactacagaaattagctggacatggtggtatgtgcctgtagtcctagctaacatttttaatttttttagagacggggtctcgctatgttgcccaggctggtctctaacccctggctcaagcgatcctcccgtctcagcgtcccaaagagctgggatgacaggcatgagccactgcatctggcccctttaatctgttttatgtttaaatagaggaagtggtaaccactgggttaaggaagtcccaatgggtgctctgccctcacggagctcactgtgtggggagggagagggacaaggagaccaatacccaggacaacatccatctgggtgagagagaagccaggatgcgtgagcttgaattatgaggatgagcttctcagaggaagagcgtcttgcattgggtattgaaggtcgagtaggagttcaccaagcgagtgcttggcaaaggggtcatcccaggtaaggggatgtaggcccctgatttttaaaatcctttttgcagagatgcggtcttgctgtgttgcccaggctggtctcatgctcctggccttaagcatttctcctgccttggcctctaaaggcacagggattacagacatcagccaccatgtctggccccaagacatttttctaaaagacattttctttgaagctatatcccctgattagagttctcacactgtggttctcacataaaccactcccagaattagagaccggcctggccaagatggcgaaaccccgcctctactaaaaatacaaaaattagctggacacggtggtgcgtgcctgtagtcctagctgctcggtaggctgaggctggagaatcgcttgaacccaggaggcggaggttgcagtgagccaagatcacgccactgcactccagcctggacaacaaagactccatctcaaaaaagaaaaaaaaaatacaaaaattagccgggtgtggtggcaggcacctgtaatcccaggtacttgggaagctgaggcaggagaatcgcttcaacctgggaggtgggggttgcagtgagccaagattgcgccactgcactccagcctgggcaacagagcgagactctgtctcaaaaataaaatgaaataaaatttaataaggcataggaacacgcctgtggacccagctactcaggaagctgagtggggaggatcgcttgagcccaggaggttgaggttgcagtgagctgtgattgtgccacttcaccctccctgagtgacagagtgagaccttgtctcttaaaaaaaaaaagtaatctgtgctccccctactccctcccacccctgctcactgagggcaggaagaggtctccaggcacccaggcccctcgccaccccagcaggtacatcccaggcactgttccccaaacagagcacgtccaagttcccatcttccatcccacagggccctgttggaggaagccagaaagcgaagactgctggaggactccgactcagaggatgaggctgctccctcgcccctgcagccagcccttcggcccaaccccaccgccatcctggatgaggtaagtggggtgcctgagtcctgggggctcccaggtgaactagggacaactgaagccaggggtcagcttgactttttcttttgttttttgtttttgttttttgagacggagtctcgctctgtcgcctaggctggagtgcagtggcacgatcttggctcactgcaacctctgcctcccaggttcaagcgattctcctgcctcagcctcccgagtagctgggactacaggcacgcgccaccaagcccagctaattttttgtatttttagtagagatggggtttcaccatgttgggaaggatggtctcaatctcttcacctcgtgatccgcccgcctaggcctcccaaagtgctgggattacaggcgtgagccaccatgcccgaccagaacttgactttttcttaaaaggccagtctgcaccctaactcctccaccctgtggctgtagcccaaaacacccatgatcaggtgtaaataagtgggtgttgcctggtgccaataaatctttatttataggcggggtgcagtggctcatgcctgtaatcccagcattttgggaggccaaggcaggaggatcgcttgaggccgggagtttgagaccagcctgggcaacaaagtgagaccccttctttacaaaattacaaaaattagtcatgggtggtggtgcatgtctgtggtcccagctgtttgagagactgaggcaggaggaccgcttgagcccagaaggtcaaggctgcagtgagctgcatcagtatgaccgaactccagcctgagcaagagtgagaccctgtctaaaataaacaaataaaaattaaggctgagtgcagtggctcacgcttgtaatcccagctactcagaaggctgaggcaggagaatcgcttgaacccgggaggcggaggttgcagcgagccgagatcgtgccactgcaccccagcctgggtgacagaatgagactctgtctcaaaaaaaaaaaaaaaaaaacttaatttactaaaactggtggcaggcctatgggtctgtaattcgccaacccctgtttaagctgccgaaagaagagaatgtaaagaaagaacatagaaatttatttctcagtcataacagccctgggctgacagtctaggacttcgggcagctctgctccttggaaccattcagggactcagcctccttccttctggagcacggcttcctgcgctgtggccacagctggctcagagcaccttcagggtccggctgtgggaaggcaaaaagtgtgtggaggaccacgcagcctcagatgcggcccacctcagttcttctctcatgccagaggccacagcatagtcacaaggccccatctggtggcgaaggaaactgtgagatgcatcctccagctggtccgtgcctggctgtgctgccaactagaacgaagggaggccgggcaccgtggctcaaagtgctgtaatcccagcactttgggaggccgaggcaggcggatcatctgaggtcaggagttcgagaccagcctggccaacatggagaaaccctgtctctactaaaaatacaaaaattagctggacatggcggtgcctgcctgtaatcccagttactcgggaggctgaggcaggagaatcacttgaacctgggaggcagaggttgcagtgagctgagattgtgccattgccctccagcctgggcaacagagtgagactctatctcaaaaaaaaaaaaaaaaaaaaggaggaaggagttttggtggatgaccagcattttccaccacagctgactcatccaaggtggcctcagccactctggtttgttcattgaagaaggtggtaaaagtaggggctcataaaccaataacacagacacacagaaacgattgttctcggccgggcgcggtggctcacacctgtaatcccagcactttgggaggccaaggcgggtggatcacgaggtcaggagatcgagatcatcctatctaacacggtgaaaccccatctctgctaaaaatacaaaaaattagccgggcgtggtggcgggcgcctgtagtcccagctactcaggaggctgagacaggagaatggcgtgaacccaggaggtggagcttgcagtgagccgagattgtgccactgcactccagcctgggcgacagagcgagactctgtctcaaaaaaaaaaaaaaaaaaaaaaaaagaaacgattgttctttcttccttttttgtttgtttgtttgacacagggtcttactctgttgcccaggctggagtgcagtaatgcagtcccagctcactgcagcctgaacctcctaggctcaagcaatcctcccacctcagtctcctgagcagctgggaccacaggcacgcaccaccacgcctggctaatttttcttttctttctttctttttttttttttagacagtttcactcttgttgcccaggctggagtgcagtggtgtgatcttggctcactgcaaccttcgccccccgggttcaagcgattctactgcctcagcctcccaagtagctgggattacaggcgcctgccaccatgcccggctaatttttgtatttttagtagagatggcgtttcaccatgttggccaggctgatctagaactcctgacctcaggtgattcacctgactcggccgcccaaagtgctgggattacaggcgtgagccactgtgcctggcccctaatttttcaaattctttttgcagagatgcggtcttgctgtgttgcccaggctggtctcacgcacctggcctcaagcagttctcccgccaaggcacagggattacagacatcagccaccatgtctggccccaagacatttttctaaaagacattttctttgaagctgtgtcctctgattagagttctcacactgtggttctcacataaaccactcccagaattcattgtctacaacttcctctcttcttttcttttttttttgaatgaatcaacagagtaaaggtactttgaaagcagtccaaccttttttgatttactccctcagtcttgtgcctctacctgatttgatagcaggtgttttatttggttttaacgtgattcaccttcatcaagacttttcaaaccttcaccctaacttttataggaaggaatatctccacacttgcgttttcttggtttattttatttttattttagagatgaggtcttgctctgtcacccaggctggagtgcagtgacgcgatcacagctcgctgcagcctccaactcctgggctcaaatgatcctcccacctcagcctctcaagtagctgggacccacaagtgtgtagtgtgtgccaccacagccagctaatttttaattttcttttctttttttttttttagaggcgagtctgtatgttgtctaggctggtctcaaactcctatcctcaagcagtcctcccgccttggcctcccaatccttagtttagtttaatgatgatgagtaccacctgtagaaacaggtttgggaactaacctaggtaacttttttttttttgagacggtcttgttctttcgcccaggctggagtgcagtggcacggtctcggctcactgcaacctccggctcccagcctgtagcaattgtcctgccttagcctcctgagtagctgggattacaggcgtgtgctaccacacctggctaggttttgtattttctttttattaataaagagacggggtttcaccatgttgaccaggctggtctcgaactcttgacctcaagtggtccacccgcctcggcctcccaaagtgttgggattacaggtgtgtgcctctgtgcctggccatctgtgccttttgacttcttttcctcattttgacatcagcccagagctacgacatttttttttttttttttcgagacggcgtctcgccctgtcacccaggctggagtgcagtggcacgatctcggctcactgcaacctctgcctcccaggttcaagcgattctcctgcctcagtctcccgagtagctgggattacaggcgtgtgccaccaagcctggctaatttcttgtatttatagtagagacgggctttcaccgtgttagccaggatggtctctatctgacctcgtgatccacctgccttggcctcccaaagtgccgggattagaagcatgagccactgcgcccggcccagagccacaactttaaggaggcctctccaccaccttagcagtggccgcccctcacaccgtcagcttggcactcaaggtctctgcccattctccatcccacctagcctgccctggcacttcctgaatcacactgtggcttctcatcacgcctttacccatgccattccccttacctgggatgccccctttgccaagcactcgcttggtgaactcctactcgcccttcaatacccaatgcaagacgcccttcctctgagaagctcatcctcacaattcaagctcacgcaccctggcttctctctcacccagatggatgttatcctgggtattggtctccttgtccctctccctccccacacggtgagctccgtgagggcagagcacccattgggacttccttaacccagtggttaccacttcctctatttaaacataaaacagattgaagaggctagatgcagtggctcacgcctgtcatcccagctctttgggacgctgagacgggaggatcgcttgagccaggagtttgagaccagcctgggcaacatagcgagatcccgtctctacaaaaattaaaaatgttagcctgccatggtggcgtgcacctgcaggaggctgaggcaggagaatcgcttgagcccaggagttcgaggctgcagtgagctatgattgcaccactgcactccagcctgggcaatagagtgagaccttccccccaaaaaaatttttttaataatatagattaaagggtcccttctgttgcagttaaggagctggaggccttttctacctgcccctaactctttctcaaggcggcttcctccattttcactcgttctctcaagtacattgagcacctccttgtgccaggaactgtttgtggcaccgcagagccagcagtggggaagacaggagctcacggcagagttggggagagagttataacagccagcagagggcactgtgagcgtggacatgcagcctgcatgtgagcttgaaccatgatgggcttctcagaggaggggtgtcttgtgttgggtattgaagggtgagtaggagttcaccaagcgagtgcatggaaaagggggcatccctggtgaagggaatagcatgggtaaaggcgtggagatgagaagccatggtgtgactcaggaagtgccagaccaggctatgtgggatggagaatgggcagaggccttgagtgccaagcctagggcagtggggagccatagaggagtttagagcagaggaggaatgtggtcagtgcagcagtggaagagtgggcatggggcagtgagcaggggttgtggcgaggggccagactgggccctggatccgggccagacccccacatgtgtccccatcacctgcaggccccaaagcccaagaggaaggtggaggtctgggagcagagcgttggcagcctgggcagccggcccccgctgtcgaggctggtcgtggtgaagaaggcaaaggccgacccggactgcagcaacgggcagcctcaggcggcccccaccccaggtaaggtcacagagttcccagagccgggcgcggtttctatagtggcctgtaggtggcagcagctccctttgcagttacagagacttcatggggtgggtgggggcggcctgcgacccccacaggaccaattagtggagtgagcagagaaggcaggcggcttctttttttcttttttcttttttctttttttttttttgagacagagtcttgctctgttgcccaggctggagtgcagtggtgccatctcggctcaccgcaacctccgcctccctggtttgagcagttctctgcctcagcctcccaagtagctgggactacagcaccacgcccggctaaatttttgtattattagtagaggtgggatttctccatgttggtcaggctggtctggaactcccgacctcaggtgatccactcacctcggcctcccaaaatgctgggattacaggcatgagccaccgcgcccggcctgtttttgtcttttagttgccttagtatgatgtttcctaaggcgattaagtccacagtgactggactgtgaactttgcgccatttccattcttggcagcgcacgttgcctgcctgggcaaggtttgcattggccattgttcagaagcggagctgttgagtcccgggtgtgcagatgtaaatctgcaatgggtcccatcaggtgccatccagaaaggccaggccattcacatgctgtcacctctggaccttgcaaacctgcagaggtggccggccccgtgccttgtccctggcctgtctgctgtggagctgagatgagctaactctcgctctcccaccaggagccccgcagaacaggaaggaggccaaccctacacccctgacgcctggcgcgtcctccctgagccaactgggtgcatacctggacagtgacgacagcaacggcagcaactgagccctcccaggaccccctcacggggtcaaagtcacacgtccagcttcagccacattgaggccagcattgctggtggtcagggcaggaggccttggcgtgactggaggccggacagacaagcgccagcgtgctccaacacatagggccaccaggggcctcagccccaggaggtcccttctctgtgccctcaccagcctctcaacacctcggggacccctgctgctcctgcccccacctgtcactgtgcttagggctgcaacatccctggagcagcttccaacactacttcagggtggcagtgtttggggcactgggcgagcctgccggcctctagatggcctcatctcttccttccacaaactgtctagaaccaataaaaggaaacctgccaaccgcctgggccccttctctctcccagagtctgatgaggaggtcccaggacctcctctgttagcacaattcgagggtcattccacagaggtttgtttgtgtcttgagacaggatctcactctgttgcccaggctggagtgcggtagcgtattcttgactcactgcagccttgaacttccgagctcaggtgatcctcccacctcagcctcgcgagtcgctgagacctcaggtggatgccaccattcctggctaactttttgtatatttagtagagactgggtttcatcatgttgcccaggctgatcttgaactcatgggctcaagtgatcctcctgcctcagcctcacaaagtgctggggtcacaggcataagccactgtaacaggcatgagcccagatatttatatttagttgtcgcctgagtgtgcatctgggctctttttgttttctcttctttttttttttctttctttaccttttttttttttttttttttttggagacgacgtctcgctcttgtcccccaggctggagtgcgatggcgcgatcttggctcactgcaacctccgcctcccgggttcaagcgattctcctgcctcagcctccagagtagctgggattacaggcgcccgccaccacgcctggcttaatttttgtatttttagtagagacagggtttcaccatgttggccaggctggtcttgaactcctgacctcaggtgatctgcctgcctcagcctcccaaagtgctaagattacaggcctgagccattgtgccctgcctgtacaatctttttgtttgtttgtttgagacagagtctccctctgttgcccaggctagagtgcagtggtgtgatcttggctcactgcaacctccacctcccaggttcaagcaattctctgcctcagcctccccagcagctgggattacaggtgcctgccaccacgcccagctaatttttgtgtttttagtagagacgggtctcaccatcttggccaggctggtcttgaactcctgacctcaggtgatctgactgcctcagcctcccaaagtgcagggattacaggcgtgagacactgcaccagcctggaatcttttaaagtgaacaatatgaaccttctttgagtaggcagttccatttctggctgtctgttctaagaggtatttgcccacattcataaggaaacacccacgaggaggtttgtcgtgacactgtgtttagcagcaacattatggggaacgaacccaatgtccccagtaggtgaaggctgaactctggcataaataatggaattccagccgggtgtggtggctcaggcctggaatcccagctacttgggaggctgaggtgggaggatcacttgagcccgggagattgaggctgcagtgaggtgtaactgtaccactgcactccagccttggtgagagaccaagatcctgcctgaaaaagggggaggggggtggggagctaggcccaggacaggaactgtggcatgttcctgtaatcccaggactttggggggctgaggcaggagggttggttgaagacaggaggtcgagtccagactgggcaacatggccagaccgtttctcaatttgtctttttttaaagaaaggtggggcacggtggctcacgcatgtaatcccagcactttgggaggccacggcgggcagatcacctgaggtcaggagttcaagaccagcctggccaacatggtgagactcccaccacccccactaaaaataaaaaaattagtcagatgtggtggcgggcacctgtaatcccagctaattggtaggctgaggcaggaggatcacttgaacctggaaggtggaggttgcagtgagctgagatcatgccactgcactccagcctgggcaacagagtgagattccatctcaaaaaataattaattaaaaaaaaagatgctacaatttgccttcaaaggggctgcgctctacatactcaacaaggatgggactcactggctttatgagtagaaagctctggctgggaagttcccctcctcggcgggggcagcagaaggagttggcagagggaaggaaggaacctgtgtttatcaaatgttccctgagcatttggcagaaacaaagttgaactcccacttccaacacccgttcttattttaattttaattttttttttttttgagacagcatctcactctatcacccccgctggagtgcagtggcaggatctcggctcactgcaacctccgcctcccgggttcaagcgattctcctgcctcagcctccagagtagctgggatgacaggcacgcgccaccctgcctggcttaatttttgtatttttagtagagatggggttttgccatgttgccaggctggtctcgaactcctgacctcaagtgattcgcccgcctcagctcccaaactgctgggattacaggcgtgagctaccgcacccggcccccaaaaaacttttatgtattatatatttttacaataacatataaataatgtataccgaaggtggtgaaaataaagcaggtgagtgtgttctaaggagatgcagaggggatgccttgggaacgtgtttattgcccatctctccctctgtttgttttctggtgctgcataacaaattataccaaaactgaacaacttaaaaacaacatagagctgggtgtggtttcattgggtctcccgctttaaggtttagcaagaatgcaatcaagacagaggccaggctgggcgcagtggctcatggctgtaatcccaccactttcacaggccgaggcgggcggatcacttgaggtcatgagttcaagaccagcctggccaacatggcaaaaccctgtcactacaaaaaagtacaaaaattagttgggcatggtggtacatgcctgtaattccagctacttgggaggctgagacaggagaatcacttgaacccaggaggcagaggttgcagtgagccaagattgcaccactgcactccagccagggggacagagcgagactcccgtctcaaagaaaaaaaaaaaaaaaagacacaggcccaggctggggtgtcatctgaaggctcaactggggaaggacctgctgccaaacctttgtggttgttgacagaattcagtccctcatggctgttggccagaaaacactctcagtttcttacctacacagaccttgtctgcagcttgtgtctttgtccatttgctgctgctttcacagaacaccacagactgggtaaattataaacagtagaagtttattcgggccgggcgcagcggttcacacctgtaatcccagcactttcagaggctgaggtaggtgtatcacctgaggtcaggagtttgagaccagcctgcccaacatggtgaaactctgtctctactaaaaatacaaaaattagccgggcatggggcaggtgcctgtaatcccagctactccagaggccgaggcaggagaataacttgaacccgggaggcagaggttgcagtgagccaagattatgccattgcactccatccagcttggacaacagagtgagactccatctcaaaaaaattggtgcaccccagcaccccaaaaccagctggcacatcgtgggtgctcgcaaatgggttgagggggcatcaccccattccccaatgaggaaacaggctcagggagccccaggtttcacctcctcccctctcacaccccactctttcatacaccactggaattttatttttatttcttttttttttcccctgagaagctttgttctctcaccctgtgtcctgggggcaattctgctctcagcccccagttctctcctgggggttcccaggactgagggagtagaggggcaggcacagccatgcatcgggctctgtccctcctgaccagcgggggacccctccctgccctgccccacctctcagggccccctaccctcaccctctgaagcctgcccttcccctatccctgccgacagtacccgttccccaccagcccgcgtctgtcatcctgtcttcgggagctgtcagccttcatctgagatctccatcaactcctccggggctgcctggctgctggagcacatcagagggatggggaggaggggcgatgggggccccttctgctggagcccactgccgccccagcctgggcttacaggagaagaggggccatgccatttccccagcttttgccagttccagtgtgaacttggggctccctgagcctgtttccttatctgggaatggggtgacaccacccactcagtccacaaacaccccccgggcacacgctctgttgctgccccatttacaggtaagggagactcctcgacctccagggtgagggagggacagggcctgggtatgaagctccaggctccgaggctacgcctttggtcacccaccccactgcaaccccaagagctgggctgtgcctgcgtgtcagactggagccctggaagggctggatcatgcctcccccatcaggtaggggcccctagaaggaaggctcgcttctcctccagcagactgggaccttgtaagttagttagggccatgcctcctgtgttggactgggcccttgaaatttacaccatacctcccccatcagactggggacgcttgaagtttggactatgcctccctcatcagactggggactcttgaaggcaggcctatgtctcctccattactctgggaccctggaagtcaagactatgtctcctgcattagacaggggaccgttgaaggttgaacctgcctcccccatcagactgaagataggttcacgtctccttcctcagagtgggaacccctcaaggtagggccatatctctcccatcaaatggaagctcctgaagtcagagccgcaactcttccatcagactgggggcttctgtggacaaggccatgcctctgccatcagaccgtgagttaagaaaggcagagctggccaggtgcagtggctcacgcctgtaatcccagcactttgggaggccgaggcgggcggatcacgagatcaggagatcgagaccatcctggctaacacaatgaagccaagattgcgccactgcactccagcttggacgacagagcgaaactctgtctcaaaaaaaaaaaaaaaaaaaagacagagctggctaggcacagtggctcatgcctgtaatcccagcactttgggaggccaaggcgggcggatcacaaggtcaggagttcaacaccagcctggccaacatggtgaaaccccgtctctactaaaagtacaaaacttagccaggcatggtggcatgcacctgtaatcccagctactccagagactgaggcaggagaatcgcttgaaacaggaagcgggaggttgcagtgagccaaggtcatgccactgcactccagcctgggcaacaagagtgaaactccatctcaaaaaaaaaaaaggcagagctggccaggcgcagtggctcacgcctgtcatcccagcactttgggaggccaaggctggcatatcaccggaggtcaggagttcaagaccagcctggccaatgtggtgaaatcctgtctctactaaaaataaaaaattagctaagtgcagtggcacacacctgtagtcccagctacttgggaggctaaggcaggagaatcgcttgaacccaggaggcggaagttgcagtgggccaagattgtgccactgcactctagcctaggcaacagagtgagactctgtctcaaaaaaaaaaaataaagatggctgggtgcagtggctctcacctgtaatcccaaagctttgggagaccgaggcaggaggatcacttgaggccaggaattcaagaccagcctgggcaacattgcaagatcccaattctagaaaaaaagatttttttttttccaagatggagtctcactctattgcccacgctggagtgcagtggcacgatctcggctcactgcaacctctgcctctcaggttcaagcgattctcctatctctgcctcctgagtaggtgggattacaatgtgcctgccaccaagcctggctaatttttgtatttttagtagagacggggtttcaccatgttgggcaggatggtctcgaactcctgacctcaggtgatccacccgactcagcctctgcaagtggcgggattacaggtgtgagccaccacacccagccctctagaagaattttaaaaattaaaaaacacaggcctggccaggtgcggtggctcacgcctgtaatcccagcactttggaaggccgaggcgggtggatcatgaggtcaagagatcgagaccatcctggccaacatggtgaaaccctgtctccactaaaaatacaaaaatcagctgggcgtggtggcacatgcctgtagtcccagttactcgggaggctgaggcaggagaatcacttgaactcgggaggcgggggttgcagtgagctgagatcgtgccattgcactccagcctggtgacagagcaagctccgtctcaaaaaaacaaacaaacaaacaacaacaacaacaaaaaacacaggccccagaatggacgcagcttgaggacatcacgctcagtgagaaacaccagacacagaaggccacaaagtgtgtgatcccatttctatgaaatgtccaggacaggcccatccacagaggcaggaagtggatttgtgtttaccaggagctggggatttggagagatggggagtgacagctaattgggtatgaggtttcttttggaggtgacgaaaatgttcaggaattaggggtgatggtcgcacaaccttgtggacacaggagaaaccactgaattgtacactctaaatgggtgaactgtaggatatgtaagttatgttttttgtttttttgagatggagtctcgctctgttgcccaggctggagtgcagtggctcaatcttggctcactgcaacctctgcctcccgagttcaggtgattctcctgcctcagcctcccgagtagctgggattacaggtgcccgccaccacgcctggctaatttttgtatttttagtagagacggggttttaccatgttggccaggctggtctcgagctcctgacctcaggtcatctgcccacctcagcctcccaaagtgctgggattataggtgtgagtcactgcacccagccaatgtgaattgtatctttaaaaaaaaaaaaagcaacaaggccgtgtatggcagctcactcctgtaatctcagcactttgggggcgccaaggtgggcggatcacgaggtcaggagtttgagagcaccctggccaacatggtggaacaccatctctactaaaaatataaaaattagctgggtgtggtggcgggcgtctgtaatcccagttacttgggaggctgcggcaggagaatcgcttgaacctgggaggcggagcttgcggtgagccgaaattgtgccactgcactttagcctgggcgacagagcaagactcggcctcaaaaaaaaaaagcggccggactcggtggctcacgcctgtaatcccagcactttgggaggctgaggcgggaggatcacaaggtcaggagatcgagaccatcctggctaacagtgaaaccccatctctactaaaaatacaaaaaagtagccgggcatggtggcgggtgcctgtagtcccagctactcgggaggctgaggcaggagaatggtgtgaacccgggaggcggagcttgcagtgagccgagatcgcaccactgcactccaggcccgggcaacaaagtgagactctgcgtaagaaaaaaaaaaaagcaaaaaaaaagccgggttttgtggtatgcacctgtggtcctagctaccaggaggctgagatgggaggatcatttgagcccaggatgttgaatgtgaggctgcagtgagctgtgattgcatctccagcctgggcaacagagcgagagaccctgtctcaaaaaaaaaaaaaaaagggagaaaagaaaaatccaaatctcacaaggttacgtggctgattcaaggtcacaggggaaggtgactggacccctagcctggatctctttctcttctacctaatcctcctgcctctccctgccagcctctccccactcccctccttggggtagggtcggggtgcagccccaggagaagccagctccaaagcacaggaaagtcaaatgccgtttgattccggccccggggcctctaattgctattcctgacacagattgtaattagaaggcccctttcaaatatttatacctcagacatctagttttatccggcagggagacgacttggatttgatgagatctgtcaacagctcatccccgtggcccggaattgccttgcggctgacagaaagcaggacaattacccgctgtgctccctggccgcccccagggacgcagccttgtcgctgatctgaaagggtggggggaagcgggggtggccatgcacttcaggagggaggaaggagttcaacaggtctgtgttgggggacacagccagtgcagggaaggggaggaacagaagggtctagacgcctgcatccttcaggggctttgccttgttggctccaggcctcagttttcccatctggataatggagctcatcgtggagaggagttgcagaaccgattccatgaagagcattttgggaggccgaggccggcagatcacctgaggtcaggagttccagaccagcctggccaatgtggtgaaaccccatctctactaaaaatataaaattatataaaaattagctgggcgtggtggcagtaatcccagctactcaggaggctgaggcaggagaattggttggacctgggaggtggaggtttcagtgagctgagatcgcaacacggcactccagcctggaggacagagcaaggctccgtctcaaaaaaataaaaagagagactccagtgccaccctaggccaggccccacggcgatgtgcaggcagaatcagctgtggagtggctctgaacaagtccctcccatctctgtgcctcggtttccccatccataaaatgaggaagccaggtgatagctcggtccctcctggaatccttcctagagctgtctgggatttcctgttagaaaccacatctttcaaataaggaaaaccaagactcagggagtgacagaccctgccctcagccccgccgggctgccaggaggccccagtcatagcagtgttggttctgacttctgtcttgtcctccaactgtgctctccaagctatgacctgtgcctgaccagggggctggccacaagaggagagaatctggggtcccatccttcctgaccacccctctctcactcccctcattaggaggaactgggcaagcccccttatggggaaagaaaaaaaacggttctgcactggaaaattggccagtggctcccttttcctctcccaccccccaaacctctcagtgccctcaccctcagacaacgacagctgacaacaggcagccagttcaggccagacccctctcacttctgcccctcttcccgccaccgctcccccccaccccgcccccagaagccacaaaaggacagatgcagaggacaggcgccaggcacagataccatctcccttccccaagccagctgcccccaaccctccccctgcccgcaattagtcctctggggcgggagcggggcacagagcagagccctcttgggggaggggaagcccgatccgcacccacccttcctttgcccccctcttccttctgctgctccaatatcaatttcagccagtgacctctccaccaatttgcacatccccactctcccggtccgtttcaccgccagacatcggttccatttcgaccctcactggcggtcattcccaccccctctgctggtcaatttcaccccttttggcggtcaagtgcagtcccccatttcccgggcaatttccccctcccctccttctccctctcccctcccctccccagcagtgtcactcccagctgctccccacctcccgcgctccgcgctcgctgcggccagtctcgggcgtcccggtcagtgtccagctgccgcggcctcggccccggcgactcccgcccccagccccccttccctccgcgggcagcggctccctccctccccagaacagctgaaggtctcagtcacctccgaggggagcgcagggggaggggaggggcgggggacgcggcggaggggaggtgggggagccttgacgctgctgcccgggacgcggcccggggctggtgggaacaggggcgtcctcctgcgcgcccccctccccagcgtcccacctcccggcggcggcggggaaagtctctccgaaagcgtgaagggggattggaggaggtttttatttccctttgtgcgggtggctggggccggatcgaggcggcgggggccgcgggactgggggctccccgctgagccgagaggagcgcgacaaaggatgcgtcccgccggggtcacagtctccgcggcccaactttgcgcgcggcgcccgcgcccctggggagcccgcccgctgcgctgagaacccaggcgtccgggctgggagaggggccgggagcgtccgcaggtggcgctggcccggatctcccgaccccaggaagggatcccggagcttcctggaggcggcgggcggccgtgtcgctccagggaaccgcgctgcccgcggaaactccgcgcgcctccgcggatgcccctcgccctagcccccagcgcgcggggttcggggccctgcgaggtccccccttcccccgcggtgcttcccaagctgggctaaggcgggcttctcttcctccctcctctgtcgcctccttttcctccccctcgttcaccttttccttccctctatccatccagagccccgccaaagggcgcacctgatctttctcatccttccctgctcttcccttcctctccacctcctcctcctccttggggaaaggggcccggagaagggcatgtgggggcccctctgacagtggcccgattggggtgacaggcgcccaaatggccaagtggctacgggactacctgagctttgggggtcggaggccccctccgcagccgcccaccccggactacaccgagagcgacatcctgagggcctaccgcgcgcagaagaacctggacttcgaggacccctatgaggacgcggagagccgcttggagccggaccccgcgggccctggggactccaagaaccccggagatgccaagtatggttctcccaagcaccggctcatcaaggtggaggctgcggatatggccagagccaaggcccttctgggcggccccggggaggaggtgcgtggctgggtggcctggggagactgggtggaggggaggctcaggatgggctctctggatcgtggagagcttattttatgtgtgatcacaggaggggactggggcaccagacagacccttcccagtcctccagacctccacctgcttggggaagtctgttctttttatgtatttatttattttgagacagtctccccctgtcacccaggctggagtgcagtggtgggatctcggctcattgcaacctccacctcctggggttcaagcgattctcctgcctcagcctctccagtagctgagattacaggtgtgtgccaccacacccggctaatttttgtattttcagtagagactggtttcaccatgttagccaggctggactcaaactcctgacctcaggtgatcctcccgcctctgcctcccgaagtgctgggattacaggtgtgagtcactgcgcccggtggatatctgtcccttttcaatgcataatgctggttgtccttctgcctctctgaccaccctgcttggtctccgggtcctcctcctcctccatggtcatcccctgcagtcccccagccccctcccctcagcaccccttcctcttggaacctggtgggatcttcctaaaatagatctgagtgagttgctcccctgctgggcacctaaatatcctcccggtgatgctgcccttcctaccactatgttcccgttttacagaagcgaaactgaggctcgcagaacggtagtgacttggctaaggtctcacggggttctagcttactaggatttgaacccaggccaccgggtgcagtagctcatgcctgtaattccagcactttgggaggtcgaggtgggaggattgcttgagcccaggagttcgagaccagcccgggctaacagagtgagaccttgtctctacaaaaaaaaaatcaaaacattagctagttgtggtggtgcacaccatagtcccagctactcaggaggctgaggcaggaggatcacttgagcctagaaggtcaaagctgcagtgagtcatgattgcgccactgcactccaacctgggtgacagagcaacaccctgtctcaaaaaaaaaaaaaaaaaaaaaaaaaaaggctgggtgtggtggttcacacctgtaatcccagcactttgggaggccaaggcaggtggatcacctgaggtcaggagttccagaccagcctggccaacacagtgaaaccccatctctaccaaaaatgcaaaaattaaccaggcgatgtggcgtgcgcctataatcccagctactcctgaggctgaggcaggagaattgcttgaacccaggaggtggaggttgcagtgagccaacatcgcgccactgcactccagcctgggtgacaagagcgagactctgtctcaataaataaataaataagaagtaagacgttggtaagaagagccagggactcgaggaaaccagtcagccgggatcagactcggcctcttacttaccagctgtgtgtccctaagcaaaacacttactgtctctgtgccttggcttccttgtctggaaaaggggaatggtgtacttattacatgttggtattacaaatcaacacaggtaaatccttgacaatagtgcacggagaagcactgaagtgggcgaaggagggaggcaggtgtctgtgctggggaaatgggatcaagacagagggagacgtgggaagccagccgctgtctgcgagcacttttgggtaacagactccctctccaacccccaaaaagaactcttggagaggccaggcactgtggctcatgcctgtaatcccagcactttgagaggctgaagcgggcggatcatctgaggtcaggagttgaagaccagcctggccaacatggtgaaaccctgtctctactaaaaatgcaaaaattagccaggtttggtggccggcaccagtaattccagctactccagagactgaggcaggagaattgcttgatcccgggagtcggaggttgcagtgagccgagatcacaccactgcactgtagcctgggcaacggagcaagactccatctcaaaataaataaataaataaaactcagctgggcgcggttgctcacgcctgtaatcccagcacgttgggagcccgaggcgggcagatcacgaggtcaggagatcgagaccatcccggctaacacggtgaaaccccatctctacaaaaagttagccaggcatggtggcgggcgcctgtagtcccagctactcgggaggctgaggcaggagaatgacgtgaacccaggaggcagagcttgcagtgagcccagatcccgccactgcactccagcctgggtgacagagcgagactccatctcaaaaaataaaaataaaaataaataaataaataataaaaaaataaaaactcttggagaggtgtcagatggccctgtgggcaggcaagaggtgcagcgtcaattagcagggaagcccctctgagtccttgtcttctccccttccttctctccgcagctggaagccgacactgagtatttagacccctttgatgctcagcctcatcctgcacccccggatgatgggtacatggagccctacgatgcccaatgggtcatgagtggtgagtaggcacggcttgggggaaggtgacagggtcccagatgggagcaggagctgaacagtgtccctggcctcctagaacttcccggcagaggggtgcagctctatgacaccccttatgaggaacaggacccagagacagcagatggacccccttctgggcagaagcctcggcagagccggatgccccaggaagatgaacggccagcagatgagtatgatcagccctgggagtggaagaaagaccacatctccagggcgtttgcaggtgcttctcagacccacactctgacatctgaatgccccatccctgcatttcctcatctggtcatgtctcctgtttcagtttacaaagtagagtccaattacttgtcacttttgtagtttgttaattctcactagagtgtgaatgactgatagtcctaaattctttcttccaagacaacctgcatcttccttggaaacgcaaacactttttagagtggaatggaacctacttatcctgctcagtgtggtgtggggagaggaatatggcttgcttttagaataggatgtgggggtggcaggggcagcatttctttattttattttattttattttatttttctttcgtttttcttccaggcggagtctcactctgtcgcccaggctggagtgcagtggcgtgatctcggctcactgcaagcttcgcctcctgggttcacgccattctcctgcctcagcctcccgagtagctgggactacaggcgcccgccaccacgcccggctaattttttgtatttttagtagagacggggtttcaccatgtcagccaggatggtctcgatcttctgacctcgtgatccacccgcctcggcctcccaaagtgctgggattacaggcaggagccaccgcgcccccgcccggggcagcatttcttaatagctgctagtaaactacaggtgaatttccagctgaattggatgagcttggagaagcctctgaaccttagttttctcttctgtaaaagagataatgataaaatcagttttaaaaaataaaataattgccgggcacggtggctcacgcctgtaatcccagcactttgagaggccgaggcgggtggatcgtttgaggtcaggagttcgagaccagcctgaccaacatggagaaaccccgtcttactaaaaatgcaaaattagtcgggcgtggtggtgcatgccggtaatcccagctactcaggaggctgaggtaggagaattgcttgaacctggaggcggaggttgcggtgagccaagatcgtgccattgcactccagcctgagcagcgagagcaaaactttgtctctaaataaacaaatacataaaataaaataaataaaatttggaccaggaagagttgtgcaaacacgactttgcccccaaagttttatgactgggagggtatttagagcttagtgcctttgtccacctgtctgtagattgggggtgattttctagttttaggacttggccacagtctgggctgaaccccagaaggggtttagggactagggctcctctttggaaacttcgaaccgaccccgtctagccacgccccttgtgctccttgccaccagatttataaatgaccgcacctatttcttaggaaggccaaaaggttgcacctgtggccaatcctgcccctgccttaagcccagcccctgggctgtgataggttgtcccaagctggccctgcctttctaccgagattccattggcttgcccctgccccgccccccaaggtaggctggacttaaccctttcctctctaaatctcctttccagtgcagtttgacagtccagagtgggagaggactccaggctcagccaaggagctccggagacctccgcccagaagcccccagcctgcggagcgtgtggacccagccctgcccctggagaaacagccgtgagtggggaagctgaaggtggaagagccccgttgaacgtatctgtagactccaatgtatcaggcagaagttttttcgtttcccagattagaggaactgggggaacttcgattcattcatccacttatttcttcagctaatctttacgggctccagagcctgctgcgtgccaggcacccagctagacacaaaacaatcttatggggtcccttttcctttggtatcaagttctgggttcacattcctgctctcctctcctggctgtgtagcctggggcaagtcacttaacctctctgagcctcaggttcaaacagaaaaggcaatttccttccttaacttgggtggggcttacagcctcagagccaagagacagaaatcattctcagccagttcttggttcttgggatggaaccaggagatgcaggattttggtgggctcacagctccgtgctggggtggcacgtgagccgggagacgctgactctgtgtccttccagcctgggcgctccttgagggagtgcccaagtccccagaatccagaccatgttgtcacagtcacccctaaaatctcttcggtgggcaatacagaactggctatttaactctgaggccgagggtgtgaagattgttctctttttttctttctcttcctccctccctccctccccgagtcttgctgtgtcgcccaggctggagtgcagtgacgcgacctcggctcactgcaacctccatctcacaggttcaagcgattctcatgcctcagcctccagagtaggtgggactacaggcgtgcaccaccatgcctagctaatttttgtattttcagtagagacagagtttcagtatgttggccaggctggtctggaactcctgacctcatgatccatccacctcggcctcccaaagtgctgggattacaggtgtgagccaccccgcccggcccttcctccttctcttctcttctctttcttttcttttcctttctttttttttttttttttttttgacagagcctcgctcttgtcgcccaggctggagtgcaatgacacaatctcagctcactgcaacctccgcctccctggttcaagcaattctcttgcctcagcctcccaagtagctgggaatacaggctcctggcaccacaccaggctaatttttgtatttttagtagagacagagtttcaccatgttagccaggctggtctcaaactcctgacctcaggtgatgtgcttgccttggcctcccaaagtgttgggatgacagccatgagccaccgcacctggcccgctctttctttttctttctttctttctttctttctttcttttctttctttctttctttctttctttctctctttctttctttctttctttttttctttccttccttccttccttccttccttcctaccttccttccttccttcctttctttctctctttctttctttcttttgagacagggtctcactctgttgcccaggctgaagtgcagtggcacaatcagctcactgtacccctgcactcctgggatcaagcgatcctccagcctcagcctctccatgggaccacaggcacgccatatgtgcttattctcttttcagatttctttcattgtgaacaacagcaaaggctctggtgcttctctgtctttgatatcttgcttgctactgcaaacccctttgtgagcacattaaagcaaaacattaggccaggcacggtggctcacgcctgttatcccagcactttgggaggccggggtgggcagatcatgaggtcaagagatcaagaccatcctggccaacatggtgaaactccatcattagccggacatggtggtgcgtgcctgtaatcccagctactcgggaggctgaggcaggagaatctcttgaacctgcgaggtggaggttgcagtgagctgagatcacgccactgtactccagcctggcgacagagtgagactccatctcaaaataaaacaaaaaaacattaagaaaggggctgggtaaggtggctcatggatgtaatcccagcactttgggaggctgaagcagcggataacctgaggtcaagagtttgagaccagccaggccaacatggtgaaaccccatctctactaaaaatagaaaaaaattagccaggcagccgggcgcagtggctcatgcctgtaatcccagcactttgggaggccgaggtgggcggatcacaaggttagagattgagaccagcctgactaacatggtgaaacccagtctttacgaaaaatgcaaaaaattagctgggcgtggtggcgggtgcctgtagtcccagctacttgggaggctgaggcaggagaatggcgtgaaccggggaggcggagcttacagtgagccgagatcgtgccactgcactccagcctgggtgacagagcgagactctgtctcaaaaaaaaagaaagaaaaagaaaaaaacagaaagggacaggtgggtgaggtacaagatgaagcaccacttttgtgaaagtggttgaagttgacaaggacatgagggaggctgtgaagatcaatgtcaagtgtacgataaccagggctcctcttgaaaaatccaagggtattggccgggcatggtggctcaagcctgtaatcccagtactttgggaggccaaggagggcagataacctgaggttaggagttcgagaccagcctggccaacatggtgaaaccccatctctactaaaaatgcaaaaattagccatgtgtggtgctatgcgcctgtagttccagctactctggaggctgaggcaggagaatcgcttgaacccaggaggcggaggttgtggtgagccaagattgcaccactgcactccaacctggcaacagagcaagactctgtctcaaaaaaaaagaaaaaagaaaactccaagggaattgtccttcttcatttgcccagatgccacaagcccatgcaccagctgtgacccaacagatcccagagtgtgtttttttgtttgtttgtttgtttgttcgtttgttttgagacagagtctcactctgttgcccaggctggagtgcagtggtgcaatctcagctcacaacttccacctccctggttcaagcaatttccctacctcagcctcctgagtagctgggattacaggcacccgccaccacgcccggctaattttttttgtatttttagtagaaacggggtttcaccatgttagggagactggtttcgaactcctgacctcaggcaatccgcccgcgtcagcctcccaaagtgctgggattacagggccccagagtgtgtttgaagggaatggcccttgatgagacatctgtccatactcgctaggtggtttcatggccccctgaacagggcggatgcagagagcctcctgtccctctgcaaggaaggcagctacctagtgcggctcagtgagaccaacccccaggactgctccttgtctctcaggtgagaactcagcctcacagggacgaagggtcacaggattgcgtgagtcacccttttgggttaattcagagggaaggggagggtgtggctcccgcagccatagggaagggcttccaggtcagtgggtgggacttctaggagaaggggtgggagttctggggaggccattagctggttgcaattgagaatgagctcaccatcgctggaggtatacaagaagatggagtggaaggcatcgaggaggtccaggccttgggtaagacaaggaactaggtgcacaagattcctctggactccccttgtccaaaaatggaggtatatcaatttgtgtccatctgaagccaaaatttcagggtgtacctgtaagcgttttaggttgagaccctgtttgtacgcacttccgtccctaaaattctaagtctgtctaattataaaccactcctaagattctgctaggtgtctgagtggaagatctaaaagcacgagattggggctgagcgcggcagctgacgtctgtaatcccagcactttggaaggctgaggaaggtggatcacttgaggtcaggagttcgagaccagcctggccaacatggtgaaaccccttctctcctaaaaatacaaatattagttgggcatagtggtgcatacctgtaattccagctacctcggaggctgaggcaggagaattgcttgaacctgggagacggaagactttcggcgcataccaccgtgcccagctaatttttttttttttttttttttttttgagacggagtctagctctgtcacccaggctggagtgcagtggcgcgatctcggctcactgcaagctctgcctcccgggttcacgccattctcctgcctcagcctcccgagtagctgggactacaggcgcccaccaccacgcccggctaatttttttgtatttttagtagagacggggtttcactgtgttagccaggatggtctcgatctcctgacctcgtgatccgcccgcctcagcctcccaaagtgctgggattacaggtgtgagccgccatgcccggctaatttttgtattcttagtacagacagggtttcgccatgttggccaggctggtctcaaactcctggcctcaagcaatccgcctgactcggcctcccaaagtgctgggattgcaggtgtgggtcactgcacctggcctcttattattattattatttatttatttatttatttattttttgagacagagtctcgctctgtcgcctaggctggagtatagtggcacgatctcggctcactgcaagctccgcctcccgggttcacgccattctcctgcctcagcctcccgagtagctgggactacaggcgcccaccaccacacccagctaattttttgtattttttagtagacacggggtttcaccgtgttagccaggatggtctccatctcctgacctcgtgatccgcctgccttggcctcccaaagtgctgtgattacaggcgtgagccaccgcgcccagcctatttttttattattattattttgagacagagtctcactctgtcacccaggctggggtgcagtggcacaatatcagctcactgcagcctctgcctcccaggttcaagggattctcatgcctcagcctcttgagtagctgggaccacaggcacccgccaccacgcccggctaatttttgtatttttagtggagatggggtttcaccatgttggccaggctggtctcaaactcgtaacctcaagtgatctgcctgactcggcctcccaaagtgctgggattacaggcgtgagccaccgcacccgcctaatttttaaatgttttttggtggagacggggtctcactctgttggccaggctggtctctaacgcctggcctggagtaagcctacagcctcagcttcccatatcactgggattacaggtgtgagcgagtataccagccaccacactgctgtttaccagagactggagacacacgagcacctggcctgggcactgtgggaggtggctttggggatggtgcctttctgggtgggtccgggatgctcaggagtccctttctccctcatcgcccaggagcagccagggcttcctgcatctgaagttcgcgcggacccgtgagaaccaggtggtgctgggccaacacagcgggcccttccccagcgtgcccgagctcgtcctccactacagttcacgcccactgccggtgcagggtgccgagcatctggctctgctgtaccccgtggtcacgcagaccccctgacagtgaccctcggcccccttttgagtcctcgggcccagaatcgtatcccaaagccctcccatggcctagaaaataaataagttattgtttgtcttagtgtcctttctgggctacagagggaagtgggatcgttgactcccagcgggaaagccctaagcagccctggagagggggataatggggtaattgaaaccctggaggaggccaggcacggtggctcacgcctgtaatcccagcactttgggaggttgaggcaggcagatcacctgaggttgggagttcgagaccatcctgaccaacacggagaaaccgcgtctctactaaaaatacaaaattaaccgggcgtggtggcgcatgcgtctaatcccagatactcgggaggctgaggcaggagaatcgtttgaacccaggaggcggagattgcagtgggctgagatcgcaccattacactccagtctggggaacaagagtgaaacgcctccatctcagaacaaacaaacataaaaaaccctcgaggccttgagggccaagcacatccccagcactttgttttggggacagagttgggattggaacctgaatctcccatagggagggaccagaactcagcaagagacagagcgtcgtggagcagattaaaaaccgcactccatagaaaccgacagatacaaagatggagaaactgaggggggccaggctctcgggccagccccgctccctccccccggcagcagtggcttgatctgcagaaaggacatctgtccccatggaaacagcagaagtaggggaggggagctgggcctagctggtgtcacttcaaggtgacaggccaggcaggcaggagacctggggggctggtaaacaccatgaatctcctgacctccccttcttctccccacctccaggcctgcctgggagtgatgccagctgcggggggggtcttccatggcaggggactgtttggaagccagagtaccacttcttcctccttggatttgtccctataaggtgggaggggggctttgagttgccacaaagtcccttggccacagtgggcctctccagccacccctgagagctctgggaccccagatgaccccttaagtctttttggtgcgtgtatgtgacagggtctcactctaccacctaggctggagggcagtgacataattagagctcactgcaacctcaacctccagggctgaagtggtcctcccctctcagcctcccaaatatctgagaccagagacatcagctgcaccatcacgcccggctaaattttgtatttttcgtagagacggagtttcaccatgttggccaggctggtctcgaactcctgacctcaggtgatccgcccacctcggcctcccaaagtgttgggattacaggcgcaagccaccgcgtctggccttgtttttaaattttctgtagaaatggagtcttcttgctctattgcccaggctggtctcaaactcttggcttcaagtgatccttccaccgcagcctcccaaagtgctgggattagaggcgtgagccaccgcacccgatttcttcagatctttttagcactcccaaatcgccacaaacaccagctttgctttttcttcacaagcctttattaggttcttgggggaaagtgggagcgagatccatcattacagaaatgaggacggggtctcaggatggggctgacaggctcccaatcctcctgctttttgttttttttgagacggagtctcactctgtcgcccaggctggagtgcagtggcgcaatctcggctcactgcaacctccgcctcccaggttcaagccaggctggtctcaaacccctgacctcaagtgttccacccgcctcggcttcccaaactgctgggattacaggcgtgagccaccgtgtctggcctcgatccccccttttttgtgtgtacctatgggtggggtcctgttgaggtctcctgggatctctcactcctctcccactttggggaacccttttggcctcggctgctgggtggggcttggtctaggagagaccctgaccatagagacggggtggccgggcctggggctggggcagggtctcgggctggggcagggtcttgacgccaggtgcggctggcggggggccggttgcgggaaggaggttgaataaatgctctggcccctctggtccttcccctctccagagcagtcctcactcttctttggggccccccggggccggtataggacgttgctgtagaatgcatttcctaggatggatgacacagaccaagaggatcacttaagagagtcctgccctctccagctgacctctgggggatctgtctctttttttttttttctgtgagacggagtctcactctgtcgcccaggctggagtgcagtggcgcaatctcggctcactgcaagcttcgcctcctgggttcacgccattctcctgcctcagcctcccaactagctgggactacaggctcccgccaccatgcctggctgattttttgtatttttagtagagacggggtttcactgttagccaggatggtcttgatctcctgacctcgtgatccacccgcctcggcctcccaaagtgctgggattacaggcgtgagccaccgcgcccggcctttttttttttttttttgagacagtcttactctgtcacctgggctggagtgtagcagcggtgcgatctcagctcactgcagtctccacctcccaggttcaagtgattctcctgcctcagtctccctagtagctgggattacaagcccccgctactacgtctggctaattttttgtatttttagcagagatggggtttcaccacgttggccaggctggtctcgaactcctggcctcgtgattcgcccgccgtggcctcccaaaatgctgggattacatgcatgagccactgcacccggccaatttttttttttttttaatttcaaactgtctttttgtttgtttgtttgttttttgagacagggtctctctctgtcacccaggctggagtacagtggggaaactatagctcactgcagcctccgcctcccaggttcaagcaatcctcacacctcagcctcccaagtagctgggaccacaggcgtgtgccaccaagccaggctaatttttttgttgttgttgagatggagtctggctgtgtcgcccaggctggagtgtagtgaggcagtctgggctcactgcaatctctgcctcctgggttccagtgattctcctgcctcaacctcccaagcagctgggactacaggcacaggccaccacgcctgggtaatgtttgtatttttagtagagactgggtttcaccatgtcgcccaggctggtctcaaactcctgacctcaagtgatccacccgcctcagcctcccaaagtgctgggatgacaggcatgagacaccatgcacagcctaatttttaaatttttttttttttgagaccgcgtcttgctctgtcacccaggctagagttcagtggcgcgatcttggctcactgcaacctctgcctcccgggttcaagcgatcctcctgcctcagcctcccaagtagctggtattacaggcgtctgccaccacacctagctaattttttgtatttttagtagatacaaggtttcaccatattgtccaggctgacctcaggtgattcgcccacctcggcctcccaaaatgctgggatgacaggcatgagccaccgcgcccagcaatttgtaatttttttgtagagatgggatcttgctaggttgcacaggctaggggctttgtctctatttctgaaaaacatgagcataggatataggagccaggcttctcctcccttcatccctcctccatccttcccccaggcgggagcacagatgcagtgggtctttgtcaagcagctgcagttcccacctcctccgccctaccctcccttacctgggctgttacctgagtccctttgctggcagctgcggcggccccagaaccaggcaccccacacgatcgcagccacacccatgcttcccacccccagcagcacgaagaggaatcctgggtagggggagaagagatggtctaatcaggaggggaaggggtggtgatgcgggtggaagacgctgggggaggaacacagggcagggctcacctgggaagcttgcgatccggtttctgttctgtgtggggtcatctgcagagaagaaatctatgtcacgggggtgccaggcttctccaccctccaaggacagagctcacttggggggacctaagtgttcctcctcctgccaggctttgtggatttgggcaagtgttcactctgaacctctgtttcttcttctgaaaaatgaggctcagcaggacgcggtggctcaggcctgtaatccgagcactctgggaggctgaggcaggaggatcactcgaggtcaggagttcgagaccagcctggccaacatggtgaaaccccatctctacaaaaaaatataaaaattagccaggcatggtggtggcgcctttaatcccaactactcaggaggctgaggcaggagaatcgcttgaatccaggagggggaggttgcagtgagccgagatcgtgtcactacgctccagcctgggtgacagagcaagactctgcctcaaaaaaaaaaaaaaagaaggccaggcgcagtggctcacacctgtaatcttagcactttgggagaccgaggtaggcggatcacaaggtcaggcgatcgagaccatcctggctaacacagtgaaaccccgtctctactaaaaatacaaaaaattagccggccatggtggtgggcacctgtagtcccagctactcgggaggctgaggcaggagaatggtgtgaacccgggaggcggagcttgcagtgagccaagatcgagccactgcactccagcctgggcgacagagcgagactgtctcgaaaaaaaaaaagaaaaatgaggctcatcgtccctgtcttgttgggtcattgtggaaaaactgccaactgggatttgtcatcatgagccccgccatctttatcctgggatctatcactctccagatcctgtttggttgtttttgtttttgtttgagcctctactccatgccacgcccattttatagacggggaaaccgaggctcagagagcctaagtcacttgcctagggtcccctacccaggcggcagcaggaaccagctttggacaaagccctgtctcacctcagctcggagatcctaacactgaagttccttgagaacttactatgtctcaggccctgtgctaagcattgttttgttgttgttgtttgtttttctggagacagggtcgctctgtgtcacccaggctggagtgcagtggcgtgatcgtagctcactgcagtctccaactcctgggctcaagtgatcctcccgcctcaacctctcaagtagctgggactatgggtatatgccaccatgcctggctaattttagaatttcttgtagagatgaggtcttgctgtgttggccaagctggtctcgacctcctggcctcaaacaatcctcccaccttggcctcccaaagtgctgggatatcaggcgtgagccactgcacttggattatagcaagcactttggctataactgctctaaagtcacccgacctgatgaggaaaaactattcactgtattttgacagcagagggaactggcacagagaggtcaagtcacttgctcaaggtcacacagcaagtaaatgaaacagaggattgaatccaggttgtataatttacaggaaccccagctaaaggctgtgaatgccgcaattaagataaggtccagcaccccaacccccttcttttgcagcctctgaggttggcaggggatccctggggactgccaagctgctgttcaggattggtggggtgtggggaagccagctgtgtggggttggacccgcgcccactccctgctctctcacagctgccaacgcacagcctggcgcctccaccaccccgcctcctctaattgctaattggcccctttgacatcagaggggtgggaagaggtgggtaacacagccataacacacccctcccttgaggcaggcacgtgtcccccgccagcaggctggtcctaccagctggagaggaacaggcatctctaggggctgagagctgggtgcttcattctgccagagggggctggacagaggcccggggcccacaggcacctctcacagagcaggaggcaaagcctgcatccccttgggtttcccgattctgcccaggatgggtccataagtgggggacatggcaaaggggacagtgcatagggtgcacccctgcctggtgcataacgctagatatgtcttggccctctctggttcacctggctcatctgtaaagtgaggcagctggcgttgctgacctggaaagctatctggagggtttcttccaactttgagagtctgtggcttttttttttttttttttttgagacagagtcttgctctgtagcccaggctggagtgcagtggtacaatctgagctcactgcaacctccccctcccggattctcctgcctcagcctcctgagtagctggaattacaggctcacaccaccatgcccagctactttttgtatttttagtagagagggggttttcatcatgttggccaggctggtctcgaacccctgacctcaggtgatccacccaccttggccttccaaagtgctaggattacagggatgagctaccgcgcccagctgatggctttattttatttagagacagggtctcgctctgtcgcccaggctggagtgcagtggtgcactcatagctcactgcagcctccagctcctgggctcaggtgatcctcttgccttagcctcccaaaatgctgggattacaagcatcagccactatgcctggctgatgactttcaattttgtatcctaaaattcttggattatgggccgggcatggtggctcaggcctgtaatcccagtactttgggaggctgaggcaggcagatcacgaggtcaagagatcgagactatcctggccaacatggtgaaacctcgtctctactaaaaatacaaaaattagctgggcgtgctggcacgtgcctgtaatcccagctacttgggaggctgaggcgggagaatcgcttgaacctaggaggcggaggttgcagtgagccgagatcgcgcccctgcactccaaggcctggacgacagagcaagactctgtctcttaaaaaaaaaaaaaaaagtttgatatgaagaatttagagttttttgtttctaggagtttaagactcaaaagtcttaagattctaggatcctccccactgcccctccctctccccgctggctcccgtacctgggtccacaaagagccttgttatgttgccctcagcctcctccaactcaggaatctctacggccgcccagcacacgtacgccccgctgtggttgaggctcacagggtccagctgcagggtgagatggctgggtgcctgccaggagagccgtccctggggcccgcagacccccaggctgaggctgccgttggtgatgtacggttgacacaggatggccccatcctttgtccacttaacacggagccgttcccaggctgtggcctggtccacctggcagaccagggtcgcctgactgccctgcctcacctgcagcaagttgggcccctgctgcacgctcaggcttgaggcttcttgcagggctggaggacagaagaggtagaggcgacctttctgactgtgcgcatgtgaggctgtgtgactcactcccctagtgagcccgcagtctgggtttgaaacctcacttgtctaagacgggtgcagtggctcacgcctgtagtcccagcactttggaagcccgaggtgggaggattgcttgagcccaggagttccagaccagcctgggaacatagcaagacctcatctctacaataaatatttaaaaagtagctgggtatggtggcgtgcaccgtgggcccagctatttaagagactaagtgaagggatcgcttgagcccaggcgttcgaggctgcggtgagctatgattgcaccactgcactccagcctgggtgacaaagcaacaccctgtctctaaaaatttaacataaaaaaaaaaccaaagaacctcactgtctgtatgacctttggaaggtcatgtcttgctgaggctcaacaaccccatctgtaagatgggtataagtcgctcagagcttgtggaattctgagatagtctccagtactcagctacacaaataccgcctagtatatgccaggccctatgctgggtgtggggaacacagacacaggcatgaccaaaacagatgaaaatccctgcccttcagaagctgacaatctagggcaagagagacacaggaagtcgtgaaatgagaactgcagtgggggaaaggaatggcagtggcctcagcagacaccagtgaggtcagggagcatctattccttgagagtaatcagggaaggcctccttgaggtggtgattttttatttttttaattttttttgagttggggtctggctctatagtccaggctggagtgcagtggcaccatcacagctcacggcagccctgaactcctgggctaaagtaatcctcctacctcagcctcccaagtagctgggactacaggcatgtaaccactatgcctggctaatttttttggttttgtagagattggggtctcactgtgttgcccaggctggtgttgaattcctgggctcaagtgatcctccccgctaacgcctcccaaagtgctgggattgtagatgtgagccactgtgaccggcctttttttttttcttaagaccacgccactgcactctagcctgggcaacagagtgagactccatatataagaaaaaaagactccatctcactctgttgcccagtctggagcgcagtggcaccatcaaagttcattgcagcctcagccgcttgggctcatgggctgggtgctgtgactcatgcctgtaatccctgtactttgggaagtcaaggccggtggatcacctgaggtcaggagttcgagacccgtctggccaacgtggtgaaactccatctctactaaaaatacaaaaattagccagtgtggtggcgggctcctggaatcccagctacatgggaggctgaggcaggagaatcacttgaatccgagaggcagaggttgcagtgagctgagaccctgccactgcactctagcttgggcaacagagcgagactccatagcaaagaaaaaaagactccatctcattctattgcccagtctggagtgcagtggcaccttcatagctcactgcaggatcaacctcctgggttcatgggccgggtgcagtggctcacgcctgtaatcccagcactttgggaggccgaggcgggtggatcacctgaggtcaggagttcaagaccagcctggccaacatggtgaaaccctgtctctacttaaactacaaaaattagctgggcatggtggcgggtgcctgtaatcccagctacttgggaggctgaggcaggagaatcgcttgaacccgggaggtggaggttgcagtgacctgagatcgtgccactgcactccagcctgggtgacagagcgaggctctgtctcaaacaaaacaaaacaaggccgggtgcagtggctcacgcctataatcccagcactttgggaggcagaggcgggcggatcacgaggtcaggagatcaagaccatcctgcccaacatggtgaaaccccgtctctactaaaaatacaaaaattagctgggtgtggtggcatgtacccgtagtcccagctactcgggaggctgaggcgggagaatcacttgaacccgggaggcggaggttgcagtgagctgagatcgcgccactgcactccagcctggcgacagagcgagactgtgtctcaaaataaaaaacaaaacaaaacattcctgggctcatgtgatcctcccacctcagcctcccaaattactggtgttacaagtacatgccactgtgctcagcctgaccagggatcttaatggaaaggtataaccagtgtgagaaggaaggtattggggggtaagagcattccaggcagtgcacagcccatgcaaaggccctggggcaggactgtgcctggcgtgttggaggaacagcgaggaggcccgtgtggctggagcagagtgaggacagggagagagggaggaagggttgggcagggcctgtgagccttggggtggtgtggggaggtgaaggaagttaagcagtttatgttttaatgtaagtgtgatggaaaatcagaaagcagggaagaaatagtccaattgaagtttttgtttttgtttttgtttttgttttgagatggggtctcactctgttgcccaggtgggagtgcagtggtgtgatctcggctcattgcaacctctgcctcccaggttcaagtgattcttgtggctcagcctcttgagtagctgggactacaggcactcgctaccacgcccagctaatttttgtatttttggtagagatggggtttcaccaacatggccaggctggtctggaactcctgacctcaagtgatccacctgcctcagtctccaatttaagttttaataaaaagaccttggttgggtgtggtggctcatgcctgttatcccagccctttgggtggccaagactgggtgattgcttgaggccaggagttcaagaccagcctgggcaacatagtgagacccatctctaaaaaacaaaaatgactgggcacggtggctcacgcctgtaatcccagcactttgggaggccaaggtgggtggatcatgaggtcaggagttcgagacccacctggccgagatggcgaaaccccgtctctactaaaaatacaaaaaaaattagccaggcgcagtggcgcgcgcctgcagtcccagctactcgggagcctgaggcaggagaatctcttgaacctgggaggcagaggttgcagtcaaccgagatcgcgtcactgcactctagcctgggtgacagagcaagactccttctcaaaacaaaacaaaacaaacaaacaaaaaaacacaaatgaacaacaaaaaagtgcaagcggctggaatcagaggagagggaaagaggaatggaggttttcgccccaggaaatgtgtgaagggcagcagcctttgtccttaattggaaacacagagggagctgctgccggagtagaaagtctgcttttagctgtgagaagtctgacgtgtctgttagacccccggagaagttgaggttatgtgaagttcctggcatttgagatgcaattgcagaggagggtagagacatgagatctggagaagggtattaggcagctggaacagcaggtgcaaaggctcgaaggccagatccagccttcccattgcggaaacagagaaagaaaagtccccaggctagagcaagagggagggagcaaaggcactgcggagggtggagatgagagaggccaggccaggctggtatgtagggcaaggtttagattgtatcctaggggccctcagaggatccttccttaatcctccagcccccatcacgttctgagtctcggagggagatgggccttatctgacagtagagagactgaagtttagaggggccctgagctggggggcaggcagctggggatgacagcaagagtggggttcagaggggagggaggcccagatactcaccccagatctgcaccaggaggcccagcaccatgcccggggaccccattcctggcccatcacccccctctccccctcccagttgacagacttcctgccacaatctccgcctcccgctgcagaagcagatgcaacacccagggccagacaacagacgtccggtgttccagcctgctgggggctccacttcctgccacctcgtgcctcagtttccccaatgcattttctatctgaaaggcagtgtacggaccaggcaacatggctcatgtctgtaatcccagcactttgggaggccgaggcaggtggatcacctgaggtcaggagttcgagaccagcttggccaacatgatgaaacccctactaatttctactaaaaatacagaaattagctggacatggtgatgggcgcctataatcccagctacttgggaggctgaggcaggagaatggcttaaacccgggaggcggaggttgcagtgagccaagatcacgccactgcactccagcctgggcgacaagagtgaaactccgtctcagaaaaaaagaaaagaaaggcagtgtatgcaagtgagtgggaggaatccacccctgtgagctttctggaaggctctacataaacacatctaggtacaggaagacacagtgcgagagcaggtggctccgtgggggaggggcaggcgacataggcctgagcagtgagttaaatgacagggtccctgcctcaattattttgctcccaaaatgtctttcttttgctgggcgctgtagctcacacctgtaatcccagcactttgtgaggctgaggtgggaggatcacttgagccgagtttaagatcaacctggggtaacacagcgagatccaatctctattaaaaaaaaaaaaaaaaaaaaaaagatacaggctgggcatggtggcccaggcctgtaatcccagcactttgggaggccaaggcgggtggatcacctgaggtcaggagttcaagaccagcctagccaacatggcaaaacccggtctctactaaaaatacaaaaattagctgggcctagtggtgggcgcctgtagtcccagctactcagtggggttgaggcaggagaatcgccagaactggggagatggagattacagggagccgagatcctgccactgcactccagcctgggcgacagagtgagactgtgtctcaaaaaaaaaaaaaaagatacaaaaccaacccagggtgatggtgcatgcctatagtcccagccactcgggaggctgaggcaggagaaccgcttgagcccaggagttggaggctgcagtaagccatgattgcgccccgttactccagcctgggcaacagagtgagtccgtctctaaaaaaaaataataataataatttaaaaaatcttcctttgaggttcagagaaatagatttctgttgataactttgggtcctattacatgacctgcttgggggtcccgtggaggaggttcatgggctctcgagttcctcccagccctgcatccctcacccctgattctgtagtgcattctgggaggaggtggcgaacccacagacctcaatgtctcagacccaactgcagagtgacctcctttctcactcggacctagaaggcctgcatcgtacacagcgttcccctccaccacagggaggttctgcggtggctatgcctgcacctcccctgcagacacgtacacccgcccagcctcccctacccactccttcccctccccagaacattctgaagctccacccttccccccaccgtctgctgagggaccctggatagattagcccccaggtccttccaaagctggacccagacattcttagcttccgcacctgggctggcacggagacttctggaggagctgttggagcctggggctttgtggggtgtataggagttcagttgtgacatagggacaaatggaaagaaggcactggaggctaaacaccctcttgggcaaaagccttagattttcagtaaatgccaggcgggctagacaatttgagtagcaacggataacctgtgtgagtgaacaagtggggaaactgaggcacgggagcattagagatgattctgaggtcccacggcagggccaggggtcgagccccttgtcttctcatccaaggctctctccagctcacatatcaccaccaacaccgcccagtgagccccaggcgctggatgtgagggctctgggcgaggccagcgcggaactacatttcccaggcggccgcggcgggtgcgcctgcgcaatgcgcgcggtgatggagcgctaaccgggggcgcggcggcggcgagggctcggcgggccattggctaccggccgcggcaaaggcagcttggggacccagcgtgcgcggggcccgcgggccgggccggggtgacctgggctgcagccatggaagaacagagggtaggacggggtggggcagggcgggcccgcaggggcgtcgggggcggggaaggggaccaggtgttgccgcagcgcccccactccctccccgcctccaccccagctgctctgcggctgaggccccaccccattcgcgaccccgcccggatctagcccccctaccccagtttgggacgcagcccccccacatcttggcttggggccaggcacgtgccttctacgcccccccaccctgcccagtatcccagtcccatccctgacccccatcccccacgccctccctcctggccgcggaccaggcgtcccggccccccgccccacccctggaagacgccccgccagctccgcagtgcggaccccaccgaccctgccccaggaaaaaggagcaggttggagcctgggtcagagcaagaggctcccgagcgggatcctccctcccagaatcccctgcccttccccaagacctccctgccccctccccgcttacctggcgcccccgcatccctggcccccaggttccacctttgcccaggtaatttctttctccttgcttatctttctcccccaggtaggccccacccctgttccgaggctagcccctatcccaggctatcccacctccctggggtttttccttccaccgagaaccctttccccaggttagcccattttccagcagacatccttctcctctggggttttctgtcctcaggctagcccctcacgccccaccttcaggatgtaggtatcgggttgtagcctttgtgctcaagcacgcctggttcggggccagggtctgtcccttcctgagaggttctctgtgagcctcagtttcctctcctgtaatatggggtagcttagggcgcccagctgctatgggtgaattgtatcagcccggagctttacctcctggctggtgcccaagctcaatagcgtggcagcccccacatctcctctctggatccctggaggggagcgcgggtcagggagcctggccaggctgacgggctcacctgcctgccgtgtgtgtgtgcgcatgtgtgtgcatgtgtgtgcgcacgcgtgtgcatttatgtacgtgtgtgcatgtgtgtgcacgtgtgtacatgtgcgtacacgtgtgtgtacctgtgtgcgcacatgtgtgtgtgcacctgtgtgtgtccacacttctggtggtgcaggaggccctgaggaagatcatcaaaacactggctgtgaagaatgaagaaattcagagctttatctactccctgaaacagatgctgctgaacgtggaggtgaaggcggtggggcagtcctggggaggtaaggggaggggaggaagctggagggtgcagccttaggaactggcccattgctgttgatgcctgtgggaggtctcaggttccctctctgaacacgggctttggccgattctggctgttccgacccaggcgaactcggcgaaggtgcaggaggacctcgaagcagagttccagtccctcttctccctcctggaggagctgaaagaaggcatgcttatgaagataaaacaggaccgtgccagccgtacctacgagctgcaggtgagggctgagggcatcttcctctccccccgcccctcctactcaacagaacgtagctgacctcggcaccttcctccaaaaactgggtgctctcgagtttctgatctctcccctgacccctccatccacctgtacactctctcttttttttttttgagacggaggtctcgctctgtcgcccaggctggagtgcagtggcatgatatcggctcactgcaacctccgcctcctgggttcaagcaattctcctacctcagcctcccaagtagctgggattacaggtacccgccatcatgctgggctaattttcgtatttttagtagagatggggtttcaccgtgtgggccaagctgacctcaggtgatcctcctgcctcagcctcccaaagtgctgggatgacaggcatgagcccccgcgcctggcccatctgtgctctctctgaatcccctctccatcacggcgtccccgagtctggctcagatcttcccctcctgtcttcactcagtgcctccggtttctcagcccttcccactggccccccagatctgaaggtatcacctccactcaaacaccacccatggctcccgtgggctgtcactcagactccaagctggagtcacacaggctgcatccagacctcctgggcaacttcctgacatcccagattcctgtcccagggggaatctagagccctggagctcggatgtggcctaggcatgtgagtttttggtttgttttgttttgagacagagtcttattctgtcacccaggctggagtccagtggcgcaatcatgcctcactgcagcgtccgcctcccaggcttaagcgattctcccatcttagcctcccaagtagctgggaccacaggaaggtgccaccacgcccagctcatttttgtattttttggtggagactggttttcaccatgttgcctagactagtcttgaactcatgggctcaagcgatcctcctgccttggcctcccaaattgctgggattacaggcatgagcctctgtgcctggctcatgtgagttttttttgttttgttttgtttttgagatggagtctctctctgtgacccaggctggatcagttgcacaacctcagctcactgcaacctccgcctcccgggttcaagtgattctcctgcctcagcctcccgagtagctgggattagaggtgcccaccaccacacccagctacttttttctatgtttagtggagacagggtttcactgtgttggccaggctagtcttgaactcctgacctcaggtgatcctcccgcctcagcctcccaaagtgctgggattacaggcctgagccaccacacccggccttacgtgtttttagggaagggattccccagggattctgttctgctccccgagcccagccccatttggtggggcgctcaaggctccaatctccatctctcacctggagttcgagaagggcatggtaccctggattctgaatggggtggggagccctcagggggcctgaggcagtggggtgagttgtcccctcctttggtgcctggtatccacagaaccagctggctgcctgcacgcgggccctggagagctccgaggagcttctggagacagccaaccagactctgcaggccatggacagcgaggactttcctcaggtgggtgcctctgatgctgccaggtaaagaacagtgtgcccagtcacgtttgcatttcaggtgaacaagcacatttttagtgtaagtatagcccacccatgcgatagttggcaaaagtacatactgataccaagaaagtgtccaggccgggcacagtggctacgcctgtaatcccagcactttgggaggctgaggcagtggatcacctgaggtcaggagttcaagactagcctggccaacacggggaaaccccatctctactaaaaatacaaacattagctggatgtggtggtgggcgcctgtaatcccagctacttgggaggctgaggcgggagaatcgcttgaacctgggaggcagaggttgccgtgagctgagattgtgtcactgcattccagactgggcaacagagggagacttcatctcaaaaacaaagaaaaaaagaaaagaaagcattcaggctgggtgcagtggctcatgcctgtaataccagcagtttgggaggccgaggcaggaggattgcttgaggccaggagtttcagaccaacatgggcaacatagtgaaaccccatctctacaaaaaataaaataattggccaggcacaggggctcatgcctgtaatcccagcactttgggaggccaaggcgggcggatcacgaggtcaggagatcaagaccatcctaacacagtgaaaccccgtctctactaaaaaaaaatacaaataaattagccgggcgtggtggcgggcacctgtagttccagctactcgggaggctgaggcaggagaatggcgtgaactcgggaggcggagcttgcagtgagccaagatcgcgccaccgcactccagcctgggcaacagagcgagactccgtcgcaaaaaaaagagattgagaccatcttggctaggacggtgaaaccccgtctctactaaatatacaaaaagttagccgggcatggtggcgggcacctgtagtcccagctactcaggaggctgaggcaggaggatggtgtgaacccgggaggcagagcttgcagtgagcagagatcgcaccactgcactccagcctaggtgacagagcaagactctgtttcaaaaaataaaataaaataaaataattagctgggtgtggtggcacacacctgtggtcccagctactcaagaggctgaagtgggaggattgtttgagctccagagttcaaggttacaatgagccgtgattgttacactgcactctagcctgagggacagagccagaccttgtctcaaaaaaaaagaaaaaaaaagtattcattgttgatctgaaatgcaaatgaataaatacttttttagtataagggtatatatgtgcacactaagaactgcatttgtgtgagtatatcccaaagagtgcatgggacatagtcatgatttatctgaaatgccaatttaactgggcatcctgtagttttattcagtgaatttgccagctgtatgggctgggtgtgggcaggaggttggggtggggatgggagcctgtcttggccatcctctgtcttcagggcacagtccagaagtgcagggacactttggcaaataccttcctcgagaggcctcagtcttcatgtctgtagagtggctttatgatttggtagaaacaaatctttgggccgggcgcagtggctcacgcctgtaatcccagcactttgggaggctgaggcgggccgatcatgaggtcaggagatcaagacaagcctggctaatacagtgaaaccctatctctgctaaaaatacaaaaaattagctgggtgtggtggcgggcgcctgtagtcccagctactcgggaggctgaggcaggagaatggcgtgaacccgggaggcggagcttgcagtgagccgagatcgtgccactgcactccagcctgaacgacagagcaagactccatctcaaaaaaaaaaaaacacaaaaaatgaaacaaatctttgggccaggcacggtggctcatgcctgtaatcccagcactctgggaggctgaggcaggcggatcacctgaggtcaggagtttgagaccagtgtggccaacatggcaaaaccccatctctctaaaaatacaaaaaattggccgggtgtggtggtgggtgcttgtaatcccagctactcaggaggctgaggcagaattgcttgaacccaggaggtggaggttgcagtgagccgagatctctccactgcaatccagcctgggcaacagagcaagactccgtctcaaaaacaaaaaaagaaatctttgaatgttgttctgttcctctctctaggctgccaagcaaatcaaagatgggtaagacactggggtctggcccccaccccactaccctgcccctggtgtgaagacaggggccacctggtgagggtgtctcatctcagagccctggacgggagccctggggaggggccccctcgcgccacggatgaccaggcctggtcccccacgcaacgcctgccacctccttcctgcagagtgaccatggcccctgccttccggctatcattgaaagcgaaggtcagtgacaacatgagtcacctcatggtggacttcgcgcaagagcggcagatgctacaggcactcaagttcctgcctggtgagaggggcacgcactagagggccaggacttccggggaatgacctgggaggctaggaggccctgaaacaggacctggagtatggtggacgacccggtgtctgaattccgcctgggggaggtggagctctgagaattccacgccctgtggggggtggagttctcatggagccccgcccctgggtggagccatgggaagaccccacccactgtgtagtgacatcctgggaaaactctgtacccaggggtggaactgtgagaataccatgtcctgtggggttggttgagtcctcatgaggccccgccctggggtggagccatgagaaggtcaaactcaccaggtgggaaaatcctgtccccaggggtggagccctgagaatagcacgtcctgtgggggtggggtattcatcaagtcccgcccatgggtggagccatcagaaagccccacccaccagggggtgaggtcctgggaaaactctgtccacaggggtggagccctgagaataccatgtcgttgggggagtggagtcctcccgagacctcctccctggatagagccacgagaagggcctgcccaccacatggtagctcctgggaaaaccctgtttccaggggtggagccctgagaaggccacgtccccgaggagaaatggactgagaacccagcctgtctatgatgcagccccaaagaaagccgcatccctcattggcagagattttggaataattctgcctgtaaatgatggaatcccaagaaagctcagccctcccccaacccactgatggaaccttagcgtctccatggccgggcgcggtgactcacgcctggaatcccagcactttgggaggccgaggcgggtggatcacttgaggtcaggagttcaagaccagcctggccaacatggagaaaccctgtctctactaaaaatataaaaaattagccgggccatggtggctcacgactgtaatcccagctactcaggaggctgaggcaggagaatcgcttgaaccagggagtcggaggttgcagtgagccaagatcgtgccactgcactccagcctgggtgacaagagcaagactctgtctctaaaaaaaaaaaagtctccaccctgccaaacatggaacccctttgtggccatgcccccaaaattgtccaacatgtggttgggcagccctgcagcaagccccctgccccctgaaccaggcacagaatcccgaccccctctcctttccgtcttggtcagtgcccagcgcacccgtgatcgacctggctgagtccctggtggcagataactgtgtgaccctggtgtggcgcatgccggatgaggacagcaagattgaccactacgtgctggagtaccggcggaccaacttcgagggcccgccccgcctcaaggaggaccagccctggatggtcatcgagggcatccggcagacagagtacaccctgacaggtaagggcagtgtgtgccagctccgcccagctgtgaacagccacctcttccagcctcccgtctcgccatcagtcactgggggccttggggacgatccccaaagctcatggggtctggaagcagcctggggaggtggatcagaaatatgagacagtggccaggcgcggtggctcatgcctgtaatcccagcactttgggaggctgaagcgggtggatcgcctgaggtcaggagttcaagaccagcgtggccaacatggtgaaaccctatctctactaaaaatacaaaaaaattagccgggcatggtatcgggcacctgtaatcccagctactcaggaggctaaggcgggagaattgcttgaacccggaaggtggagatggcactgagccgagatcgcgctattgcactccagcctgggcaacaaaagcgaaactcatctcaaaaaaacaaaaaataataataatgaatataggccgggcgcggtagctcacgcctgtaatcccagcactttgggaggccgaggcgggccgatcacaaggtcaggagatcgagaccatcctggctaacacggtgaaatactgtatctactaaaaaaatacaaaaaattagccgggcgtggcggtgtgcacctgtagtcccagctgctcaggaggctgaggcaggagaatggcgtgaactcgggaggcggagcttgcagtgagcctagattgcgccactgcactccagcctgggcgacagagcaagactccgtctcaaaaaataaataaataaataaataaataaataaataataataatgaatatatttttccagacatgggatcctgccatttccctaggctggtctccaacccctggcctcaagcagtcctgcctcagcctcccaaatagctgtgtactgtcctcggagcagggaacaaagcagacaataatcttttccctcctagagctggcgttctggattcaccctccaagtatttggggtcctccttggcagttacaagaaattgaaagctggccaggcatggtggctcaagcctgtgatacagcactttgggaggctgaggcaagaggattgcttgaggccaggagctggagaccagcttgggtaacaaagcaagagcccatctataaaaaaaaaaaaaatttaaagttacctgagcatggtggtccccgctaccaagggaggctaaggtgggaggattgtttgagcccaagaattggaggctgcagtgagccatgactgcaccaccgcactccagcctgagcaacagagcgagaccctgtctctactaaacaaagagagaaaaataaagaaaaaaaaaaacaaaacccaaggaatccacccagctggtggaggtagggtctgaagggggaaagcctcctgggccgggcgtggtggctcacacctgtactcccagcactttgggaggcttaggcgggcggatcttgaagtcacgagattgagaccagcctgaccaacatggtgaaaccctgtctctactaaaaatacaaaaattagctgggtgtggtggcgggcgcctgtaatcccagctactcgggaggctgaggcaggagaattgcttgaacccaggaagcagaagttgcagtgagctgagattgcgccactgagctccagcctggttacagagcgagactccgtctcaaaaaaaaaaaaaacaaaaagccatcctggccaggcgtggtggctcacgctgtaatcccagcactttgggaggctgaggtgggtggatcacttgaggtcaggagttcaagaccagcctggccagcatggtaaaaccctgtctctactaaaaatgcaaaaaaattagtggggcatggtggcggatgcctgtagtcccagctacttgggaggctgaggagtgagaatcacttcagcctgggaggcggaggctgcagtgagcagagatcgcgccactgcactccagcttgggcaacagagggagactccgtctcaaaaaaaaaaaagaaaaaaaaagccatcctgatccaggggaatcccggaggggcggggagaggctggctgacgggtttaactatcaccattcactagctgcttttgggctgtaatcagccagctagttatctgtaattagcatacatggttaatcatgagcacgctaactgcagggggaaaagtcatcagcctcaggagctgcaaacagccattggcttatcctttgcttgagaatcaaaataaacacaccccttttatttgttgtaaataggattcctcaaatccctcctccaagtgcccccgccttttggttttgttttcttgtaactttgtattttgaaataattatagatccacaggaagttgccaaaacaactaaaacaaaaagtacagtgaggacccatgtagtcagcataaaacccgggaaatggacacgggtgcagtggactcacattctaccttttttttttttttttgagatggagtctcgctttgtcgcccaggctggagtgcagtggcctgatctcggctcaccgcaacctccgcctcctgggttcaagcaattctcctgtctcagcctccctagtaactgggattacaggcgcccaccaccatgcctggctaatttttgtatttttagtagagatggggtttctccatgttgaccaggctggtctctaactcctgacctcaggtgatccgcctgcctcggcctcccagtgctgggatgacaggcgtgagccaccacgccccgccacattttaccagttttacacgcgctcattcgggtgttccacacagttttctcccatgtgtaaattcatgtcaccaccaacaccacggtcaaagtatagatctcttctgtcactacgaggcttccaggtgctacgctttataaccatggcttcctgcctttgacagacttcctagtgagtgaattcctcagggcagaaagttggattcatggaaagctgtgcaggagtaaggataccgatgaaagcagctgcctatgtggtcgtttgcaatccacctactgttttgttgattgcttggaaagatgggagggtttgggttattttcttctttctttcccttttttcttttttcttttttttgagacagaatctcgctctgtcgcccaagctggagtacagtggcttgatctcggctctctgcaacctctgcctcccaggttcaagcgattctcctgcctcaacctcccaagtagcttggactacaggcactataggcatgcgccccaacgcctggttaatttttttttttttttttttttttttgagacagagtctcactctgttgcccaggctggagtgcagtggtgctatctcggctcactgcaagctccgcctcccgggttcacgccattctcctgcctcagcctcccaagtagctgggactacaggcgcctgccaccacgcctggctaattttttgtatttttagtagagacgggttttcaccgtgttagccaggatggtcttgatctcctgaccttgtgatccgcctccgtcggcctcccaaagtgctgggattacaggcgtgagccaccgtgcctggcctttttttttttttttttttttgagttgcagtctcgctctgtcacccaggctggagtgcaatgatgcgatctttggctcactgcaacttctgcctcctgggttcaagcaattctcctgccccagcctccccagtagctgggattacaggcccccgccaccacacctggctaatttttgtgtttttagtagagacggggtttcaccttattggcgaggctggtctcttggccaggctggtctcgaactcctgacctcaggtgatctgcctgcctcagcctcccaaagtgctgggattataggtgtgagccaccgcgcctagccagttttttgtattttttagtagagacagagtttcaccatgctggccaggctggtctcaaactcctgaccttatgggttcctcctgcctccacctcccagatgtgctgggattacaggcgtgagccaccgcacttggccttttttttttgaaagacaggttcttgctatgtagcacaggctggagtgcagtgatgcaatcatagctcactgcagcttcaacctcttgggctcacatgctcctcctccctcagcctcctgagtaactgggactacaggtgtgcaccaccacacccagctaatttttttggagggggtcagagtttcgctctgtcacccaggctagagtgcagtggtgcgatcttggctcactgcaacctctgcctcccgggttcaagtgattctccttccgcagcctcctgagtagctgggattacaggcgccaccccccgcccccaccaatttttatatttttagtagagatgcggtttcatcatgttggccaggctggtcttgaacgcctgacctcaagtgatctgcccacttcggcctcccaaagtgctgacattacaggcgtaagccaccgcacccagactaattttttattttttattatttatttatttgagacagaatctcaaataaatgtgtcgcccaggctggagtgcagtcgtgcagtacaaatctctgaaacaatcactgtgacagggtcttaaagcatcctgattggtctacgtgggttggaggtggagtcaagtaattcatagcccctcagggagaggagggcaaggaatggtctcaggggtaagatgtttgtttattttttattttttattttttttgagatggagtttcgttcttgttgcccaggctggagtgcaatggcatgatcatggctcactgcaacctccacctcccgggttcaggtgattctcctgcctcagcctcctgagtagctgggattacaggcacacaccaccacgcccggctaattttttgcatttttagtagagacgggggtttcaccatattggtcaggctggtctcgaactcccaacctcagttgatccatgcgcctcggccttccaaagtgctgggattacaggcgtgagccagtgcgcccggctggataagatgtttataaggtggttcttagaatggcgttgggaatcactgtgggacatgacagctttaacccatgactcagagtctcagggaataatacacagtgttgaaatgcctctcttgcctaccaggtctcaagtttgacatgaaatacatgaacttccgtgtgaaggcctgtaacaaggcagttgcaggagagttctctgagccggtgactctggagacaccaggtgactggattccacccttgtcctacccctaactccatggccccttcctcccacagcccccagagaccatgagaatcctcgaagcagggttgccctggctgccaggaagctcaaagctccgtccacagttggcttccttagcctgagtgtctgctataaccctgtttttgtcctttgcttctgaggtttacccagtatatctcgatggtttttgtatacagccacacacactctctctttgccaaaaaatagataagtcctctatagagctggggatgagatttgagtagtgaagactgattccagagcctttcacagtgacaccttcacatgccctgctaggaagtccctctgaaatctagcctaactcccttgtgctgtagcccagccccttttttgggattagtcctccatggaagcacagggtagtgcaattggcttgaaaatgcctccagaggctgggcacagtggctcacgcctgtgatcccaacactctgggaggctgaggcgggcggatcacgaggtcaggagttcgaaaccagcctggccaatatggtgaaaccccgtctctactgaaaatacaaaaattagctgggagtggtagcgtgtgcctgtagtcccagctacttgggaggctgaggcaggagaatcgcttgaacccaggaggcggaggttgcaatgagccgagattgtgccacagcactccagcctgggcgacagagcgagactccatctcaaaacaaaaagaaaagaaaattcctccagacgtgggagggagacttttaggcaacaacccttggccttcgcgcttctggctccatgttctgtcccctctaccctttgccatcttgtctctcctgttgtccttctgcttgtccatctctatatctgtctctctccgaggcttcgtcagtctcttatctctgtcttggactcttatctccttggctctttgattctctgtccctgtcttggtctgtcttggtcactctctgtctctctgtctctctctgtgtctctccgggtttccccatctctgtgactcccacgtctgcccggccccagcgttcatgttccgcctggatgcgtccacatcccaccagaacctgcgggtggatgatctctccgtggagtgggacgctatgggcgggaaggtgcaggatatcaaggctcgcgagaaagatggcaaggggcggacggcgtctcccatcaactccccagccaggtagcctgccccctcccctccctaagtctctggtggaggagatcagtctggacatggacacagagcccagtgtggtcagagttggggtggagaggggacctggggctggtggaacccagagagggaatgaagggagaggaggttttgagtggagttttgatggttaaataggagtttcccagatgacggagggcacaggcatgttctgacataaacatgaggtgctcgatatatagatagagccaaatactgccagagattgacccaacatccacggtggctggggtggactagggtagccttaccgtgggagagagaagtgttgaactgagcctcctgagcctgcccactccctgcccaccacagaggtactccatctcccaagaggatgccctcaggtcgtgggggacgggaccgcttcaccgctgagtcctacacagttctgggtaaggaaggggagaagaaaggggagaggggagttttgggcaggggcctaatggtgggggttgagggagaacctttgcctttggctgcggaaacaggcagccatcagcaaagctgctcccggaataacaggttgttctggcactgcccaaatggaaatatttcgggataagggattgctggggaaagccagaatttatggagtgaaggaaagagactctggaccagacagtgcctgggcaggagcttgggggcaattttctggactccatggagtatctggcacttggggagtagctgggatttagggagtagctgggatttgaggagtagctggaaagaatcattgcctatagagcaactgggtttgtgggggagctgaagccaggcaggaattttgggggatcacctgagggtatgtggaggagccagagaaaacagtctgaagagaagtcaatagtagcataagaatgattggatcctgtgaagaagaagctggagttggtggaggatgggcaagggaggaactggactttaggggaattgctactgttcagaatagagctggagaaagaggctaaaagtatgaggaagtcattgtggtcaggaatatctagagagaaggaagttagggagtagctggggtcatgaggataagctagggcctaaggggaagttatggttctatggggatctaaattttcctgggtgcacctgggattggtgagagttttagggagaagcagaagatatagggagttgtcattggagttgctgagatttgagagagagagagagatcatccttgggaaaggacctggataatttgtggtgtggggagtagctgagatcagggaggagcagacctggagaagacgtgtatagaggttcatcttgtatctggagaggaactgagatataacaaagatcagttgtgatctgggaggggcgagagtatgaggagaagctgaagctcatggaatagctgcattgggtgaaggagtagctgagatggcaagaacctggatctggggcctggggaggatctcaactctggagagaatctggattgtgtacagagctgaagccaaggggtatcccaattcagagggttcctggagagtgtgatggaggtttgaggaacacctggattccaggaggagctgaggcctggagagtatctggcttggggaatgccttgggggaacttctggcctcagcagtagctgaggcctgggagaacctgccttccacgtggagttggggtctggatagaatctggattcagagagcaagaggagggagtcttgagtcctggggagtatctggactctgtcacagcaaggagctagagggagcttctagactctgccagagctgagaactagggggagcatctggaccctgccagagctgggaactagggggagcatctggactcgaggaggacttgaggcctgtgggaacactatgagtcttccaggaacaagggtttgaggatgatctagtttctgggaagaactgaggggtatttggacatggggaggaactgaaagaagtttctatggcttggaggagtctggaaggagtagcttgggcttgtagagaatctgaaaggagtaactgaggcttggggagtatctgggcttaataaatttctggaggaagttgataaagcttaggagtatctggggggaatacccgggaatcaaggaatatctggagggaatagctgggacttgaggagcatctggagggaatagctgcagcctgaggagtatctggggggaaaagctgggactgaggagtatctgggggaaacagctgggactgaggagtatctggaggggaatcgctgggactgaggagtatctgggggaaatagctgggactgaggagtgtctggaggggaatagctgggactgaggagtatccggggaaatagctgggactgaggagtatctggggggaatagctgagactgaggagtatctggaggggaatcgctgggactgaggagtatctgggggaaatagttgggactgaggagtatctggaggggaatagctgggactgaggagtatctggaggggaatcgctgggactggggagtatctggagggaaatagctgagactgaggagtatctggggaaatagctgggactgaggagtacctggaggggaatagctgggactgaggagtatctggggggaatagctgggacctgaggagcatctggagggaataactgcagcctgaggagtatctggggggaatagctgggactgaggagtatctgggggaaacagctgggactgaggagtatctggaggggaatagctgggactgaggagtatctgtggaaatagctgggactgaggagtatctggaggggaatagctgggactgaggagtatctggggaaatagctgggactgaggagtatctggaggggaatagctgggactgaggagtatctgtggaaatagctgggactgaggagtatctggaggggaatagctgggactgaggagtatctggggaaatagctgggactgaggagtatctggggggaatagctgggactgagaagtatctgggggaaatagctggatccccgaggagtatctgggaggaatggctcaagccagagaagtatctggagggactagcagagactgaggcatatctgaagggaattactggggcccaaggagtatctggagggaatagctgggacccaagtatttggagggaataactggagtccaaggagtatctggggggaaatagctggggcccaaggagtatctgaggggaatagctgggaccctgaggagtatctgggaggaataacttggatcccgaggagtatctgggggaaatagctgggtccccaaggagtatctgggagaaatagctgggtcctcaaggattatctgggaagaatagctgggatcctgaggaatatctggggggaatagctgggtccccaagaagtatctggcggggggatagctgggatcccgaggagtatctgggaggaataacttggaccccaaggagtatctgggagaattacctggggcccaaggagtatctgagaggaacagctgggtcctcaaggattatcggggggaatagctgggatcctgaggaatatctggggggaatagctgggtccccaagaagtatctggaggggatagctgggatcccgaggagtatctgggagggataacttggacctcaaggagtatctgggagaattagctggggcccaaggagtatctgagaggaacagctgggtcctcaatgattatctggggggaatagctgggatcctgaggagtatctgggggggcggatagctgggtccccaagaagtatctggaggggatagctgggatcccgaggagtatctgggaggaatagctggagcccaaggagtatctggagggaatagcaggaaccaaggagtatctggagggaatagcaggaaccgaggagtatctggagggaatagcaggaaccgaggagtatctggaggatatagcaggaaccgaggagtatctggagggaatagctgggtccgaaggagtatctggagggaatagctggggcccaaggagtatctggagggaatagctgtggcccaaggtgtatctggagggaatagctggggcccaaggagtatctggagggaatagctggggcccaaggagtatctggggggaatagctgcggcccaaggagtatctggagggaatagctggggcccaaggagtatctggagggaatagctaggaacttgaggcgtatctgaagggaatagctggggttcaaggggtacctgaggggaatagctgggaacctgaggagtatctggggggtacagctaggaacctggggagtgtctctgcagggagcagctgtggtgtaaggagcaccttgggggctggccctttgtggaagggcatctgtggcccagttctatccagttcccctgcccacccctcctgccctgcgccacaggggacacgctgatcgacggcggggagcattactgggaggtgcgctacgagccggacagcaaggcgttcggcgtgggcgtggcctaccgcagcctgggccgcttcgagcaactgggcaagacggccgcctcctggtgcctgcacgtcaacaattggctgcaggtcagcttcacggccaagcacgccaacaaggtcaaggtgctggacgcccccgtgcccgactgcctgggtgtgcactgtgacttccaccaaggtgaccccaagccccagctgccgtctctggctgcccctgcctgagtcccctccgtctgcccccatcccacttctgaccggtcccactgtcactctgccccccgaccccaggcctcctgtccttctacaatgcccgcaccaaacaagtgctgcacactttcaagaccaggttcacacagccgctgctgcctgctttcacggtgagctgccctccgcggcccagggggaggagagggtggtgctgggcgctggggtttgaagctgagcccctcccccctccccccgctgtccctcaggtatggtgtggcagcttccaggtgacgacaggcctgcaggtccccagtgctgtgcgctgcctgcaaaagcgaggcagtgctaccagcagctccaacaccagcctcacctaggcccccaggcacccacccagctggggtgtttttgggggagtcgccgccaagcccaggctgctggagccaggcaccctcctctgtcacttgctgcttggagccttaactccagatgggggggtcaccaagagggagtgggcaccctggcgggccctctccccacctcacctcttaataaaggtcagacactggccaggcgaggccgcggtgctggttctttgggcctgggtgtggcaccgggacctcatccttcccagctgtaaaatgggcttttctcacagaatatggtggtagatttcactgagctgagggtcactgggagtaaatggggccatccgtaggcagacatctgacggacccctcgtcccctaatcccccaagccaagccagacacatgggtcctggggtcagagttttaatcctgggaaaaagaatctggccgctgggccatgccctgggactagcccgctggtccctggtgtgtccgaatcagtgctccagtgcccgcctcttctccagcttcttctgtagctctgccgtcatgtctgccagccctgggggttcaggaccaggagctgcagctggctcagggatccccagtccatgcccaccgccctgacagccacccaggaccagctacagatttgcagggccccgtgcaacaggacagtgtgctcgaaggcattaagaatttcaagacagagacagcagaaccttaaaagacagggcgcttcggagtgtggggacttgtgtgactgtacggtcacacacctgggaagcccgccccgcactgaccccgcagaccccttaccggctgtggggaagagaggctgggctgaactgactggcagcttcctgcccaagccaccattaaagactttgggctctggaagagaagacagatgaggccaggtgtggtggctcacgccggtaatcccagcactttgggaggctgaggtgggtggatcacttgaggtcaggagttcgagaccagcctgggcaacatggtgaaaccccttctctactaaaaatacaaaaattagatggacgtggtggcaggtgcctgtaatcccagctacttgggaggctgaggcaggagaatcacttgaacccggcagacagaggttgcagtgagctgagatcgcgccactgcctgggcaacagagtgagactccatctcaaaacaaaaaacaacaataaagacagatgagctgggtgcggtggctcacgcctgtaatcccagcactttgggaggccgaggtgggcggatcacgaggtcaggagatcaagaccatcctggctaacatggtgaaaccccgtctctactaaaaatacaaaaaaaaaaattagctgggcatggtggcgggcacctgtagtcccagctactggagaggctgaggcaggagaatggcgtgaacccaggaggcggagcttgcagtgagccaaggttgtgccactgcactccagcctgggcgacagagtgagactgtctcaaaaaaaaaaaaaaaagtcagatgagggctgaggctggcctgccatcaggtgagggtgggatatgggggggaccccaacctggcttgggtccaacgggtggctttggaagcttggcaggaggctttggcaacttctttggcttcaggatgactggccaactagaggaagccactgcgtggacaaaagtgtaacgtgtcacatcagctgttaacctgtttccccaacccccagctctcagcagctctgttccccacccaccatcttggttctcatagtcaacagctgggccatctccaatgggggtcacgtagttctcttcctggttcggtagtgggggcagtgggggcagcttgtcctggctagacgcaggtgacagcggcttggggccacctgtgcagggtgcaggacctgatggggaaacgtggtcactgtcaagacccatgtcatacagggacaccttgcaggttggcgggggggtctgtgtgcatgcctggagacaggcatgtgtccctgtgtgtctgtgtgtgtgcccatgtataagtctgtgtctgggccgggcgcggtggctcacgcctgtaatcccagcactttgggaggccagggtgggcggatcacctgaggtcaggggttcaagaccagcctggccaatatggtgaaaccccgtctctactaaaaatacaaaaattagcttggcgtggtggcaggctcctgtaatcgcagctactcggggctgaggcaggagaatcgcttgaacctgggagggagaggttgcagtgagccgagattgcgccactgcactccagcctgggtgacagagcaagactccatctcaaaaaaaaaaaaaagtctttgtgtggcatacacgtgtacactaattgaatctagataagttaaagtgcaacgtttgtacacacacacctgtggtgtgtatacgtgtgtgactgcacgcctgctgaggtggctgctttagtccttgtctacatgagtgcgttttgcccgtgtatctacacgtgtccgagtttgtgccggtgcacggacgtatctgcatttatgtgtacacatgtgattgtggcatgacacaggtgtatctgtgctacatagcatttgtatgtgactggaattggggcacacgtgtatttatgcatgtgtgatctgttgtgcccgcacaagtgtgtgtcaccttctggctaggcaggtggccacagttgcatggatcatgcatgtgtaatgtgtgtgtggatgtggcacttgggggtccttgcatacgcccagaccagggaagaccagacaacccacgctacattcctttctagtgtgttctctgcctcctcttcccactccataaacaggaccgatttccacctctttcccaacacccacccggattctcggtccctgtggggctactgcttgtccgggtgtaccctctgacccctcaatgcccatttctacctaaggagatcctttgggaccatctgcaaagacccactcttctgggaagctttccctgctctgcccccatcttctcccgaactctaggcgcctcccccgagcccaggtttttcctccaccccaaattcaaccctacaggatgagagtgtctgtgtttagctctgtcccaagctgggacccccgccccctcccccacacacacaccctgacggcagggtctgagtcatttctgtccctgcaactttgggaacatcagatgcaggaggtgcagccaccaaactgactgagggggcgtggctgaatgcggggtcctcgatccctcccacctcggcccgcgggaagggggcgtcacctgggcccggagcggagggcgccacccacacattctcgccattctccttatcggcttccacgtagcctggaacagagagggcggcctggaggaagcgcggcggccaggggcggcccggtccgtccgagcgggggcgggagaggtgagcactgggcccccgaactccccgaaggggcacccacctagcaccttctcgtagtcctcgtctaacaggaatggcaccagcgcctttttggtatgcgacacgaaatagttgaccacggcgtccagggaggtgcaagagaactgggggcagatgggggagcggtcaggctgctggagaagggacgcggaccccacaaagtcacttctagggactctggcccaacgctcaccggctgttccacatcgatcacgtacttggggccctcccgcttcaccttgtaatgccggaccacgtgcgtcctgcaccaggagaaagcgagtgagtggctcagcccaggctcccacaccgcccctcagggaaggccccgccccaactccaggctccgcctccaatagaaacaggtccatactggctccgcccccacagaaggccccgccactgactggttccaccccataaaggacctaagccccgttgacctcccggagcactgactgcccgatcccagcactgctcccagcggggaccaggcccgaccgacccacccccacagaagaccccacctctagtcttggcaccacctccagcgagggaccaggccagactgacaacaccctaggaaaggtccgcccctaattctggcaccgcgcctagggagaaccaggccctaaagaccccgccccaggtaggccccgccccctgtaatggctccacccccaggcaccgactctaccttctacatcgccttgcccaaccctggactgggcttgagaatttggcataaggctctgacttcgcccccagggctggctccgcctccatagccctactcaacttccaaaaaggatcacggccatgactcccccccgtagatcctgacgctgcccaaagagcccattcccatccctggatttgacttcatcccctccagtggcccagacctggcccctgcgtacctgacgttccggaggggccgatcctaacctaggagtctgactccacctacagggagtcccagctcctaacccaagacctggctcttcctgcaaaggagtcggcctgggctctaccttcttccctaggcattaaccccatacctggggcaaggccagcctcaggatcccacgaccccggagctctgatcccgcccccagccctccctgcccagctctgactccgcccccatgctcccctgcctagcattgactccacccctcccccagcccgcccaccccagctctgactccgccccaacacgcccagcgtagctctgattccgccaccagtgtactctgctcagctctgactccacccgccccagctcgcccagcccagctctgactcctcccccaatccgcccagcccagctctgactcctcccccaatccgcccacctcagctctgactcctcccccaatccgcccagctcagctctgactccgtccccagacgcccgtctcggctctggctccgtcccctggcctacccactagcgggtcggactccgcccctgcttctgaccacgcccccgcgcccaccctcttcccaccctcctcccacccagggctctccagacgcgcatgcgcacccgttgtgcatctgccgcgtggtgaccgacacgccgtcggcgccgtccccgctgggccgcagcagcaggttcccgcactcggggtagcgctccaggagcagttgtgcctccagccggctcaccttcaggaagcacctgtggcgggccgcgtcacccactcgggaccccggagaccaagtccgctcttctgcacgtaaaccctgcctcctctgagacccagccccatccccatcccctaggcccaggagaccctgccctgctctccagacccaggcccctcccacggagacccagtccggccttccaggctcctagtttttgtggggttttttgttttttttttgagacagggtttcgctcttgttgcccaggctggagtgcaatggcgctatctcggctcaccgcaacctccgcctcccgggttcaagcgattccccttcctcacaggcccggctaatttttgtatttttagtagagacgggatttctccatgttggtcaggctggtctcaaactccctacctcaggtgatccgcccgcctcggcttcccaaggtgctgggattacaggcgtgagccactgcatctggccgggttttttggttttttttttctttagagatggggtctcgctatgttgcccaggatgggtctcgaactgggtaaaagcaatcctcccgcctcgacctcccaaaacgctgagatgacaggcgcgagccaccgcggccagccaggctcttaattctggccccggagatgcagctccaacccctagggagacccagccctgcctcgtaggcacctagagcctcccctggagatcctgtcccgccctccaaacacctagaccttaccctggaggccctgcccgcctccctgatcaccaagaaccgcccacaaagacgatgctccgccccccatccaggccccgcctctagggtcccggttaccctctccgacaaataactcctccccggagacgaagcatcaccttctagacacctagactgaccacccccagaccctgtccctactcctcaggcctaggccccgccactgaagaccttaccagtcctctaggcccctagacccgctcctggagatcctgccctgcctccccagcatgggccataactccccctccccctcccccacccccagccccaaggcagtcctcatgcaaaatccaagacccaactccaggggacccaactcaccgcccaccctcagccacacaaccacctcccgtccccatcctgcagcccctcgggacaggcgggacactcacgagggtgtctccagtgcacggcgcgcctcctctttggccaagacttcagacatcatgtataggtgcccaggaagcagggtcaagtcggtcgggacacggagctgaggggcgatcgagggacagtgactgcacctggccagccgggaatggacggctgtgcccaagtcacagagtggcaaattgaggccagagctcagagcaatgaactctgacaccttagagggcaaagagggcttcgagagggttgcagaggagtgttgcatgagagtagatgctggggccgggcgcggtggctcacgcctgtaatcccagcactttgggaggccgaggcgggcggatcacctaaggtcaggagttcgagaccaacctgggcaacatggcgaaaccccgtttgtactaaaaatacaaaaaattagccgggcgtggtggcagacacctgtaatcccagctactcgggaggctggggcaggagaatcacttgaacctgggaaggcggaggctgcagtaagccaagatcacgccattgcactccagcctgggtgacagagtgagactccgttccccgctccccaaccccaccaaaaaaaaaaaaaaaagtagatgctggaatctagggtctcaaactaaagtctgcaggggccaggcaggtctcaaactcaatggcctgccagggtgaggtaggaaacagggaaatcagagggaaatcaggaaggtagactaaaattcccggttgataaatgatgtcagctaattttttttttttttttttttttgagatggagtttagttctgtcaccaagctggagtgcagtggcgcgatcttggctcactgcaacctccgactcccgggttcaagccattctcctgcctcagcctcccgagtagctggaattacaggctcccgccaccacgcccagctgatttttgtatttttagtagagacagggtttcaccgtgttggccaggatggtcttgatctcctgacctcatgatctgccagcctcggcctcccaaagtgctgggattacaggcgtgagccaccacgcctggccaatgtcagctaatttttaaaaacttagcactctgtggccaggcatggtggctcacatctataatcctatcactttgggaggccaaggagggtggattgcttgagcacggaagttggagaccagcccgggcaacatagtgagaccctgctctacaaaaaaatttttaaattagtcagatgtggtagtgtgtgtctgtatcccagctacttgggaggctgaggcaggaggactgcttgagcctgggagttggaggctgcagtgagctatgatcacaccactgcactccagcctgggcaacagagagagaccttgtctcaaaaaaataaaataagaaatacggttggtcgctgtggctcacgcctgtaatcccagcactttgagtggccaaggcgggcagatgactcaaggtcagttcaagaccagcctggccaacagggtgaaaccccatgtatactaaaaatacaaaaattagccaggcgtggtggcggacgcctgtaatcccagctactcgggaggctgagtcacaagaattgcttgaaccggggaggcagaggttgcagtgagctgagaacgtgccattgcactccagcctgggcaacagagtgagactctgtctcaaaaaaataaaacaaaattttggccgggcccggtggctcacgcctgtaatcccagcactttgggaggctgaggcgggtggatcacgagttcaggagacagagaccatcctggctaacacagtgaaaccccgtctctactaaaatacaaaaaaattagccgggcgtggtggcgggcttctgtaatcccagctactccggaggctgaggcacgagaatggcgtgaacccgggaggcggagcttgcagtgagccgagatcgcaccactgcactccagcctgggcgacagagcgagactccgtctcaaaaaaagaaaaaaagaaagaaagaaaaaggaggctttttgaggagatctggagaatgggagagagggcgcagagagccactactcttacctccaccaccgttaagatgaagcctttccacatttcccgacactccaaggtctctacctggggaacaaaagaaaggaaagaatccaagtcagtgagcctcagtctactcatcaatgaaattggactagggaagagtccctgcttcaaagggccgttttcttttttctttttcttcttttttttttttttttttttttttttgagatggagtctcattcttctgtcgcccaggctagagtacagtggcgcgatctcagctcactgcaacctccacctcccaggttcaagcgattctcctgcctcagcctcctgagtagctgggactacaggcatgcaccacctcgcccagcttttttttttttctcttagacatgagggtctcgctttgttgccaggctggtcttgaactcctgggcccaagctatccttctgccttggcgtcccaaagtgctcagattacaggcatgagccaccatgcctggctgatattatgatttttgatgttattatatcaacatttgaaaaacatagatcaggctggatgcagtggctcactcacgcctgtaatcccagcactttgggaggtcgaggcgggaggatcacttgagcctaggggttcaagaccagactgggtaacatagcgagccccctgtctctacaaaaaaataaaatattagccaggcatagtggcatgtgcttggctgaggtaggaggatcgatcgcttgagcccgggaggtcgaggctgcagtgagctatgatctcactactgcactccagcctgggcgacgagcaagaccctgtctcaaaataaaataataaataaaataaaataatagaaaaacatagatcagttcccagacctctcatgctctaaaccctcccataggccagccaccgtgactcatgcctgtaatcccagcactttgggaggccgaggtgggtggatcacttgaggtcaggagttcgagaccagcctggccaacatggtgaaaccctgtctctaccaaaaatacaaaaattagctgtgcgtggtggcacacgcctgtaatcccagctactcgggaggctgaggcaggagaatcacttaaacctgggaggcagaggttgtagtgagccaagattgcactactgcactccagcctgggtgataagagcgaaactcaaaaaataaaaataaaaaataaaccctcggctggacacggtggctcacgcctataattccagcagtttgggaagccgaggtgggtggatcacctgaggtgaggagttccaggccagcatggccaacatggtgaaaccccatctctactaaagattcaaaaaattagccaggagtggttgcgtgcgcctgtaatcccagctacttgggaggctgaggcaggagaatcacttgaacctgggaggtggaggttgcagtgagccaagatcgtgccattgcactccagcctgggtgacagggcgagacttggtctcaaaaaaaaagtaataaaataaaataaaataaaccctcccatagcacccagctcctttggggtcaagacccaagtcttacccagggcccacagggccctgtactacctgccccttcgtggttggcacaatggagggtaggagcatttgagcatcttctgcaagcaccgcccctctgcacccctccagcaagggacctaccttgaacttgatctcctgatcccggagaatcaggctgaagtgggtgccagggtcacgtgagcttccccagggaatctcatctgtgagtttctcaaatgctcccaagttgagcttctccacgtgctgggggcatagaagcaggggatctgggcaccagttccttggcctccaggccccctggatgatgtagcagccaccttgaccacaccatctacattgtctgcttggtctctgggctcaagggaaggcctgctctggagcctccattcccatccttacctggaagtcccgattgctattgtagaaataaatggtgagaccctgcaggcctgcccagaacttcttgtaatcctagggaccagaagtgcagaaagaagaggtgagctggccaagctgagtgcctttcatgtactcaatcctgtctcggggcctttgcactggttgtgctctctgccccacgctgcccccagatctttattacctcctgccttgagtttctgatcaaatgtaccttctcagggagatcctccccacccatggcccagcttctgggtgtctgttttcgtctgagaaaggaccagacggaacctcgatgtgatgagggattcagagcaacccccgccaatctatagagatgggtgctctaggggtaagttaactaactggtttaatggtatcccattcatctttcatcatccagctacccactagccatctatctatcatccatctgtccatccgcccacccacccattcatccatccacctaccattgacccatccattcacccattcatccatccatccatctgcccaccatccatccaccaatccgtccacccacccacccatccacacatccatccatccagttattcatccacccacccacccattcatccatccacctaccatttacccatccattcatccattcatctatccatccacccactcatccatccgtccatcacccccatccatccatctatccatcatggagccattcatcatccatccatccagtcattcatcaatacctacatcacccaccatccatccagtcatccatccacccacacatccatctgtccacccatccatccatccctccatcatccatccactcatccatccacccactcatccatccatccactcatctatcaatgcatccctccatccatccacctactcatccatccatccacccatccatccatccctccataatccatccatccatccactcaccgtccatcatccatccacccactcatccatccacccactcatccatccacccactcatcaatccatccacccatccatccacctatccatccatccctccatcatccacccaccatctatcatccatccacccactcatccatccacccactcatccatccatccatccatacatccatccactcatctatcaatgcatccctccatcatccatccacctactcatccatccatccctcatccatccatcatccatccatccactcatccctccatcatccatccacctactcatccatccatcatccatccatgcattcatccattcaccatccacccacccacgcatcttcccgttcatccatccatacatccctccatcgtgcatccacctattcatccatctatcattcatccatgcacttgttcatccatccatcatccacccacccacccgtctgcccactcatccatccatccactcccccatccatccatccacccacttgtatatgcactcatccatccacccacacatcctctcagccaccatcaagcccgcatgtattcaccaagcctccactcatccccccatctacccatccacctgtccatccgtagacacaagcacagatacacacatgcatttacctaacatttactgaaggctttttatgtgccagccctgctccaggcactgggactagagcaatacaggattaaacactgtattgcttcattatgtacccacgatgtgctgttgggcaagttatttgagctgtctttgtctgtttccccagctgtaaaatggtgataataatggtgccaactctggaggatctcatgagaattaggtgactttccacatgggaagcaccagggcctgcgttgagtcaagtcctcaacacgtgaactgtgactacagccctaactccctatttcagaagacagaaaactaaggctcaaagattaagtcacttgcataaggcctgggagtaaggaaagtgtggagccgggattagaacctgggtcttcttaattcgggcccatgatcttttttgttttgttttgttttgtttttaagagacagagtcttgctctgtcgcccaggctggagtgcagtggtgcgatctcggctcactgcaacctccacctcccagttcgagccattctcctgcctcagcttctcaagtagctgggattacaagtgcgcaccaccacatccagctaatttttgtattttttagtagaggtggggtttcactatatgttggccagggtgttctcgaactcctgacctcaagtgatccgccggcctcgccctcccaaagtgttgggattacaggcgtgagccactgcacactgccttttttttttttttttttttttgagacagagtctcactctgtcacctaggctgaaatgcggtggcaccatctcagctcactgcaacccccccgccccagttcaagcaattctcctgcctcagcctcccgagtagctgggattacaggtgcacaccaccacgcccagctatttttatttttagtagagatggggtttcatcatgtggccaggctggtcttgaactcctgacctcaagtgatcctcccacctcggcctcccaaagtgttgggttacaggcgtgagccaccacgcccggcccccattatctttcttttcttttttttttctttttgtttttgagagcagtctcgctcttgtcccccaggtttgagtgcaatggcttgatcttgactcactgcaaacttcgcctctcaggctcaaatgattctcctgcctctgcctcccaagtagctgggattaaggcgcctggcaccatacccagctaatttttgtattttttagtagagacgaggtttcaccatattggccaggttggtcttgaactcctgacctcaggtgatccgcctgcctcggcctcccaaagtgctgggattacaggcgtgagccacaagcccggcctcccccattatctttcttaactgcagtgatctactggctctaaagggtttgttggttggggaggatttggatgtatggaggtagaaggaaagtctactccactacaggtaagggaacctcaggggcagaggcggggacatgggcagggaggagctgggggtgtttgttttgatctgtattagaaaatgaggcagtcatggtggctcacacctctaatcccagcagtttgggaggctgagacaggaggatcacttaaggccaggagtttgagaccagcctgggcaacatagcaagaccccatcttttttttttttttgagacggagtcttgctctgttgcccaggctggagtgcagtggcacgatcttggctcactgcaacctctgcctcccaggttcaagtgattctcctgcctcagcctccagagtagctgggatcacaggcacgcaccaccacgcccggctaatctttgtatttttagtagagacggggtttcaccatattggccaggctggtctcaaactcctgacttcaggtgatccacctgcctcagcctccctaagtgctgggattacaggtgtgacccactgcgcctggccagcaagaccccatcttcaaaaaaaaaaaaaaaaggctgggtgcggtggctcatgcctgtaatcccagcatttagagaggccgagacaggtggatcacctgaggtcaagagttcaagaccagccgggccaacaaaatgaaacactgtctttactaaaaatacaaaaattaggtgtggtggtgcgtacctgtaatcccagctactcgggaggctgaggcacgagaatcgcttaatcgtttgaacctgggaggtggaggttgcagtgagccgagatggtgccactgcactgcagcctgggtgacagagtgagactcagtctcaaaaataaataaataaaataaaagccagaagaggcagtgcatgcctgtggtcccagctactcaggaggctggggcgggaggttcacttgagcccaggagtttgaggctacagtgagccatgatcgtgcccctgcactctagcctgggtgacagagcaactctgtctctaacaaaaagaaagaaagaaaatgaatatgcggcattgggaaggagagatagggcctcacggggaacggaggggctgggactttattctgagggagacataagcacacacacacacacacatgcacgcactgtccatggcaactatctgtcctgtggaatgtggcccccgctagctcttactgtcctcacatgtcacctgtcctggccttcgccccagcagctgaggttcacggagtttttcctgggctgggagcgggaggaagctcgggagtcagaggactccccatttcctggaggaagtccctgatcttgtttgtattcaagagagtgaacgagagacaaaagcaaagattgagacaaagagagagggagactgagacagacatcgggagagacagacggggccagggagagagaaagagaaaaagaaaccaaattcaaagacacacggagacagagatagacgcacagagaggcagatggccagaacccaccccagtcccccagcacgtgtcctgccccatccagcacccaccccgcccccccttggcgagtggggagacagggactcagagaggtgccgcagctccccacggtggcccagcagggccagcccccgcctccccaccttacccggtcacagggccccttcttctctagaaagctctcatagtagtgtgaaggcaggacacccttaggcttggggacacggggtggcctcagggcagaggccatgacggagccagggtcttccgcctggcctctccttccagtgggtgccccagctgggccgggaagctgagaaacaggtttcaggggagtttcctgtgtcagcccgtcaactccctcccctgccagggctgggcagaggctgatcccagcaggtccagtgatcctagggaaatccccgcctctccggtgtggaactgagaacagagagaatgtataagtctacttgaatgggagaataatcttcgctatatctgcaaagacagagacatggtctgtctctttatttatttatttatctatttttcctattttgagacagagtttcactctgttgcccaggctggagtaaagtggtatgatcttggctcactgcgacctctgcctcccgggttcaagagactgcgctgcctcccgggttcagagactgagtccaagctcagtctcctgactagcgtggattgcaggtgaccgccaccacgcctggctaatttttgtatttgtagtagagacgaggtttccccatgttggcccaggctggtctcgaactcctgaccccaagttttctgcccgcctcagcctcccaaagtgctgagattacaggcatgagccaccacacctggccctttctcttactttgatggaccctaatgattacattgggcccacctggataatccacgctactctccctattttaaagtcagctgactagcaactttaatttcatctgcaatttttcttttttagacggtgtctcattctgttgtcgatgctggagtgcagtggcacgatcatagttcactgcagccctgacctcccaatctcaagcggtcctcctgcctcagccacccgaagagctgggactataggtgggcaccaccacacccagctaatttattttccttttttaaggatgagttctcactatgttgcctaggctggagtacagtggggcgatcatgactcactgtagcctcgaccttacaggctcaagtgatcctccagcctcagcctccagagtaggtggtactacagttgcatgccaccacacctggctaatttttttttttcttttttttgagacagactctcgctctgtagcccaggctggagtgcagtggcgtgatctcggctcactgcaagctccgcctcccaggttcatgccattcgcctggctcagcctcccaagtagctgggattacaggtgcctgccaccacgcccagctaatttttacacttactagagacaggttcttgctatgttgcccaggctggtctttttttttttttttttttgagacagagtcttactctgtcacccaggctggagtgcagtggagcgatctcggcttactgcaacctctgcctcccaggttcaagcaattctcctgcctcagcctcccgagtagctgggattataggcacgtgccaccatgcccagctaatttgtttgtatttttattttagtagagatggagtttcactgtgttagccaggatggtcttaatctcctgaccttgtgatccacctgcctcgacctcccaaagtgctgggattacaggcataagccaccgtgcccggccctcaggctagtcttgaactcctgggtgcaagtgatcctccagtctaggcctcccaaagtgctggggttacaggtgtgtgccactgtgcctggcgtctatctttaatcttcaaatccctttgccacgtatcctaacgtattcacagattctgggaattagggcgtggatatctttaagagaccattattctgcctaccacagcctgtttaatatggtggacaattgattaattttgaatactgaatcagtcttgggtccctggagtaaaccccacttgtcatggtgtataattcactttatatattgttaaattctactttgtaatattttgttaaggatttttgcacgtcttcatgagggatatggggtgtagcttgctttctttgtaccgtctttatctggttttggtatcagggtcatagttccataaaatgaacagggaagtgtccccttcaattttctggaagagatgatgtgaaattggtgttaattcttctttgaacctttggcagaattccttagtgaaaccatctgggtctggagattgcttttttgggagtttttaaattacaaattcaatttccttagtagttaccagggctagactttgtatacatagcagaacaggtgttctagaaatcacagaaaggccgtgggactgtggcaatgtgttcatccactgaactgtctgataaagttgatagtatcagctatactaagtaaggtcagagagttgatttttgtttcgtttttttgtttgtttgttttttcagacagggttttgctccttttgcccaggctggagtgcagtggcatgatttcggctcactgcaacctccgcctcccgggttcaagcgattttcctgcctcagcctctggagtagctgggattacaggtgcctgccaccacccccggctaatttttttgtttttattagagatggggtttcaccatgttggtcaggctggtcttcagcttctgacctcaagtgatcccaaagtgctgggattacaggcgtgagccactgtgcccagccagggtggttagtttttattgtatttgtctaaggcaatgtggagcgacagaaggatttacagcatgagaggagggcagggtgcggtggctcacgcctgtaatccaaacactttgggagcccaagtgggaagattgcttaaggccaggacttggagaccagcatgggcaacatagtgagatccccttcttttacaagaaaattaaaaattagccaggcatgctggtcacgcctgttgtctcagctactctggaggctgaggcaagaggatcatttgagtccaggaggccaaggctgcagtgagccatgattacaccaatgcactccagcctgggagatagagcaaggccctgtctcgaaaagaaaagaaaataggctgggcgcagtggctcacacctgtaatcccagcactttgggaggctgaggcaggtggatcacctgaggttgggagttcgagaccagcctggcaaacatggtgaaaccccttctctactaaaaatacaaaaattagctgggtgtggtgatgtgcatctgcagtcccagctaattgggaggctgaggcaggagaatcgcttgaacctggtaggcagaggttgtagcgagccaagatcttgccactacactccggcctgggtgacagagcgagactccgtctcaaaaaaaaaaaaaaaaaaaaaaa
